(19) United States
(12) Patent Application Publication
(10) Pub. No.: US 2022/0372063 A1
(43) Pub. Date: Nov. 24, 2022

(54) OLIGONUCLEOTIDES CONTAINING NUCLEOTIDE ANALOGS

(71) Applicant: SANOFI, Paris (FR)

(72) Inventors: Bodo BRUNNER, Frankfurt am Main (DE); Armin HOFMEISTER, Frankfurt am Main (DE); Kerstin JAHN-HOFMANN, Frankfurt am Main (DE)

(73) Assignee: SANOFI, Paris (FR)

(21) Appl. No.: 17/641,014

(22) PCT Filed: Sep. 4, 2020
(86) PCT No.: PCT/EP2020/074800

§ 371 Date: Mar. 7, 2022

(30) Foreign Application Priority Data
Sep. 5, 2019 (EP) 19195696.0

(51) Int. Cl. C07H 21/02; A61K 31/713

(52) U.S. Cl. CPC C07H 21/02; A61K 31/713

(57) ABSTRACT

The present disclosure relates to double-stranded oligonucleotides, including double-stranded oligonucleotides such as siRNAs, comprising a sense strand oligonucleotide and an antisense strand oligonucleotide, and wherein the antisense strand oligonucleotide comprises one or more nucleotide analogs of formula (I-A) which are neither the 5′-overhang nucleotide nor the 3′-overhang nucleotide of the said antisense strand oligonucleotide, and wherein a nucleotide analog of formula (I-A) is as described in the disclosure. Oligonucleotides containing these analogs have superior biological activity, for example, increased in vitro stability and improved in vivo potency especially improved off-target profiles. The improved oligonucleotides are useful for silencing (e.g., reducing or eradicating) the expression of a target gene.

### FIELD OF THE DISCLOSURE

[0001] This disclosure relates to the field of targeted gene silencing with single and double stranded oligonucleotides, and more particularly with small interfering RNAs (siRNAs) comprising modified nucleotide analogs described herein.

### BACKGROUND

[0002] The concept of using synthetic oligonucleotides to control the expression of specific genes dates back to the late 1970s, when targeted gene silencing using a short synthetic oligonucleotide was first demonstrated (Stephenson et al., 1978, Proc Natl Acad Sci USA, 75:285-288). Subsequent to Stephenson's discovery, elucidation of the RNA interference pathway for modulation of gene expression and the role of siRNAs in the process has vastly expanded scientists' understanding of posttranscriptional gene expression control in eukaryotic cells.

[0003] Synthetic oligonucleotides include single stranded oligonucleotides such as antisense oligonucleotides (“ASOs”), antimiRs and antagomiRs and double stranded oligonucleotides such as siRNAs. ASOs and siRNAs both work by binding a target RNA through Watson-Crick base pairing, but their mechanisms of action are different. In antisense technology, ASOs form a DNA-RNA duplex with the target RNA and inhibit mRNA-translation by a blocking mechanism or cause RNase H-dependent degradation of the targeted RNA. In RNA interference technology, siRNAs bind to the RNA-induced silencing complex (“RISC”), where one strand (the “passenger strand” or “sense strand”) is displaced and the remaining strand (the “guide strand” or “antisense strand”) cooperates with RISC to bind a complementary RNA (the target RNA); once bound, the target RNA is cleaved by RNA endonuclease Argonaute (AGO) in RISC and then further degraded by RNA exonucleases.

[0004] The most significant obstacles for developing oligonucleotide therapeutics, including siRNA therapeutics, include (i) poor stability of the compounds, (ii) low efficiency of in vivo delivery to target cells, and (iii) side effects such as “off target” gene silencing and unintended immunostimulation. To address some of these obstacles, researches have attempted various oligonucleotide chemical modifications. These modifications can be classified into three categories, namely (i) sugar modifications, (ii) internucleotide linkage modifications, and (iii) nucleobase modifications.

[0005] Chemical modifications to the sugar group include modifications at the 2′-carbon atom or the 2′-hydroxy group of the ribose ring. The 2′-OMe (methoxy) nucleotide analog is one of the most widely used modifications. 2′-F (fluoro) nucleotides and 2′-O-methoxyethyl nucleotides have also been used. Although the majority of sugar alterations are localized at the 2′-position, modifications at other positions such as the 4′-position have also been reported—(Leydler at al., 1995, Antisense Res Dev, 5:161-174).

[0006] Other chemical modifications of the sugar group include linking the 2′-oxygen and 4′-carbon of the ribose scaffold in a nucleoside, creating a so-called locked nucleic acid (“LNA”). LNAs also are referred to as bicyclic nucleic acids and have been shown to have increased RNA-binding affinity (Koshin et al, 1998, Tetrahedron, 54:3607-3630; Prakash et al., 2011, Chem. Biodivers, 8:1616-1641), leading in a significant increase of their melting temperature in the resulting double stranded oligonucleotides. However, fully LNA-modified oligomers longer than eight nucleotides tend to aggregate. Contrasting with the rigid nature of the LNA modification, the highly flexible unlocked nucleic acid (“UNA”) modification has also been developed for application in oligonucleotide therapeutics. UNA nucleosides do not have the C2′-C3′-bond of the ribose sugar. Due to their open chain structure, UNAs are not conformationally restrained and have been used to modulate oligonucleotide flexibility (Mangos et al., 2003, J Am Chem Soc, 125:654-661). UNA inserts can reduce duplex melting temperature (Tm) by 5° C.-10° C. per insert in some cases. UNA- and LNA-containing siRNAs have been reported by Bramsen et al. (2010, Nucleic Acids Research, 38(17):5761-5773).

[0007] Further, expanded sugar ring systems also have been developed and applied in gene silencing technology. Such systems include six-membered morpholino ring systems, where the ribose moiety of a nucleoside is replaced by a morpholine ring. Morpholino-based nucleosides form internucleotide linkage within oligonucleotides containing them through the nitrogen atom of the morpholine subunit. Phosphorodiamidate morpholino-based oligonucleotides (“PMO”) have been used in antisense technology (Corey et al., 2001, Genome Biology, 2(5): reviews 1015.1-1015; Partridge et al., 1996, Antisense Nucleic Acid Drug Dev, 6:169-175). However, due to low binding affinity to complementary RNA, antisense PMOs need to be relatively long, e.g., 25 bases long (Corey et al., supra). Examples of morpholino subunits are also disclosed in U.S. Pat. Nos. 5,034,506; 5,166,315; 5,185,444; 5,698,685; and U.S. Patent Publication US2016US/0186174.

[0008] Chemical modifications may also be performed on internucleotide linkages by replacing the 3′-5′ phosphodiester linkage with more stable moieties to reduce susceptibility to nuclease degradation. A widely used modification is a partial or complete replacement of the phosphodiester backbone with phosphorothioate linkages, in which a sulfur atom is used in place of the oxygen atom. An alternative backbone modification that confers increased biological stability to nucleic acids is the boranophosphate linkage. In boranophosphate oligonucleotides, the non-bridging phosphodiester oxygen is replaced with an isoelectronic borane (—BH₃) moiety.

[0009] However, most of the aforementioned phosphodiester modifications such as phosphorothioates create a chiral phosphorous in the internucleotide linkage, leading to diastereomeric mixtures of the obtained oligonucleotides. Since the number of diastereomeric oligonucleotides may double with each modified phosphodiester linkage, the resulting number of diastereomers increases exponentially with an increasing number of modified phosphodiester linkages. The individual diastereomers may exhibit different degrees of nuclease resistance and different hybridizing properties to the target mRNA. In addition, purification and chemical analytics of diastereomeric mixtures is complex. Thus, in some cases, it may be desirable to avoid the use of phosphodiester modifications such as phosphorothioates and the resulting diastereomeric oligonucleotide mixture.

[0010] Other significant challenges in RNA interference technology are targeted delivery and cellular uptake of siRNAs. The cellular membrane is a bilayer of negatively charged phospholipids and is an entry barrier for siRNAs, which also are negatively charged. Some groups have used N-acetylgalactosamine (GalNAc) to target siRNA attached thereto to hepatocytes, which express the GalNAc-binding asialoglycoprotein receptor (ASGPR) and can internalize the ASGPR-bound siRNA-GalNAc conjugate through endocytosis (See, e.g., Nair et al., 2014, J Am Chem Soc, 136:16958-16961).

[0011] While progress has been made in RNA interference technology, there remains a need in the field for siRNA oligonucleotides with improved stability, reduced off-target profile and delivery to their target cells.

### SUMMARY OF THE DISCLOSURE

[0012] The present disclosure relates to a double-stranded oligonucleotide comprising a sense strand oligonucleotide and an antisense strand oligonucleotide, and wherein the antisense strand oligonucleotide comprises one or more nucleotide analogs of formula (I-A) which are neither the 5′-overhang nor the 3′-overhang of the said antisense strand oligonucleotide, and wherein a nucleotide analog of formula (I-A) is as described throughout the present description.

[0013] In some embodiments of the said double-stranded oligonucleotide, the antisense strand oligonucleotide comprises from 1 to 10 of the said nucleotide analogs of formula (I-A), preferably from 1 to 5 of the said nucleotide analogs of formula (I-A).

[0014] In some embodiments of the said double-stranded oligonucleotide, the antisense strand oligonucleotide has a nucleotide length ranging from 15 to 30 nucleotides, preferably from 20 to 25 nucleotides, and most preferably from 17 to 25 nucleotides.

[0015] In some embodiments of the said double-stranded oligonucleotide, the antisense strand oligonucleotide, the one or more nucleotide analogs of formula (I-A) comprised therein are located successively and/or non-successively, at any location of the said antisense strand oligonucleotide.

[0016] In some embodiments of the said double-stranded oligonucleotide, wherein the antisense strand oligonucleotide comprises a hybridizing region which hybridizes with the sense strand oligonucleotide, and wherein in the antisense strand oligonucleotide, the one or more nucleotide analogs of formula (I-A) comprised therein are located in a nucleotide region of the said antisense oligonucleotide ranging from the nucleotide at position 2 to the nucleotide at position 15 of the said hybridizing region, starting from the 5′-end nucleotide of the antisense strand.

[0017] In some embodiments of the said double-stranded oligonucleotide, the antisense strand oligonucleotide comprises a hybridizing region which hybridizes with the sense strand oligonucleotide, and wherein, in the antisense strand oligonucleotide, the one or more nucleotide analogs of formula (I-A) comprised therein are located in a nucleotide region of the said antisense oligonucleotide ranging from the nucleotide at position 2 to the nucleotide at position 10 of the said hybridizing region, such as from the nucleotide at position 2 to the nucleotide at position 8 of the said hybridizing region, starting from the 5′-end nucleotide of the said antisense strand.

[0018] In some embodiments of the said double-stranded oligonucleotide, the antisense strand oligonucleotide further comprises one or more nucleotide analogs of formula (I-B) as described in the present description.

[0019] In some embodiments of the said double-stranded oligonucleotide, in a nucleotide analog of formula (I-A) and (I-B) comprised in the antisense strand oligonucleotide, B is selected from a group comprising a pyrimidine, a substituted pyrimidine, a purine and a substituted purine, or any pharmaceutically acceptable salt thereof.

[0020] In some embodiments of the said double-stranded oligonucleotide, the said one or more nucleotide analogs of formula (I-A) consist of the (2R,6R)-stereoisomer thereof.

[0021] In some embodiments of the said double-stranded oligonucleotide, the sense strand oligonucleotide comprises one or more nucleotide analogs of formula (I-A) as described in the present description.

[0022] In some embodiments of the said double-stranded oligonucleotide, the sense strand oligonucleotide comprises one or more nucleotide analogs of formula (I-B) as described in the present description.

[0023] In some embodiments of the said double-stranded oligonucleotide, the sense strand comprises one or more nucleotide analogs of formula (I-B) as defined in claim 7 and wherein at least one nucleotide of formula (I-B) consists of the 5′-end or the 3′-end nucleotide and wherein the said one or more modified nucleotides of formula (I-B) are contiguous.

[0024] In some embodiments of the said double-stranded oligonucleotide, sense strand comprises one to three nucleotide analogs of formula (I-B) as defined in claim 7, which modified nucleotides of formula (I-B) are contiguous and form an oligonucleotide stretch located at the 5′-end or at the 3′-end of the sense strand.

[0025] In some embodiments, the said double-stranded oligonucleotide consists of a small interfering RNA (siRNA), or a pharmaceutically acceptable salt thereof.

[0026] The present disclosure further relates to a single-stranded antisense oligonucleotide that is complementary to a target mRNA or to a target (double-stranded) DNA, which is as defined throughout the present description.

[0027] The present disclosure also pertains to a composition comprising a double-stranded oligonucleotide or a single-stranded antisense oligonucleotide as described in the present description.

[0028] This disclosure also concerns a double-stranded oligonucleotide as described in the present description for its use as a medicament.

### DESCRIPTION OF THE FIGURES

[0029] FIG. 1: In vivo knock-down of siRNAs 2-0, 1-8, 3-3, 3-8 and 3-11

[0030] Ordinate: TTR serum level relative to the control-siRNAs

[0031] Abscissa: days post s.c. dosing

[0032] FIG. 2: In vivo knock-down of siRNAs 2-0, 1-8, 3-8 and 3-11

[0033] Ordinate: TTR mRNA expression level in liver relative to the control-siRNAs

[0034] Abscissa: doses of each of siRNAs 2-0, 1-8, 3-8 and 3-11 administered, in mg per kg.

[0035] FIG. 3: In vivo knock-down of siRNAs 2-0, 1-8, 3-8 and 3-11

[0036] Ordinate: TTR serum level as expressed in ng/ml

[0037] Abscissa: doses of each of siRNAs 2-0, 1-8, 3-8 and 3-11 administered, in mg per kg.

[0038] FIG. 4: In vivo knock-down of siRNAs 2-0, 5-1, 5-4, 5-5, 5-6, 5-8, 5-10 and 5-11

[0039] Ordinate: TTR serum level relative to the control-siRNAs

[0040] Abscissa: days post s.c. siRNA dosing

[0041] FIG. 5: In vivo knock-down of siRNAs 2-0, 5-1, 5-4, 5-5, 5-6, 5-8, 5-10 and 5-11

[0042] Ordinate: TTR serum level relative to the control-siRNAs

[0043] Abscissa: days post s.c. siRNA dosing

[0044] FIG. 6: In vivo knock-down of siRNAs 2-0, 5-1, 5-11 and 5-13.

[0045] Ordinate: TTR mRNA expression level in liver relative to the control-siRNAs

[0046] Abscissa: doses of each of siRNAs 2-0, 5-1, 5-11 and 5-13 administered, in mg per kg.

[0047] FIG. 7: In vivo knock-down of siRNAs 2-0, 5-1, 5-11 and 5-13

[0048] Ordinate: TTR serum level as expressed in ng/ml.

[0049] Abscissa: doses of each of siRNAs 2-0, 5-1, 5-11 and 5-13 administered, in mg per kg.

### DETAILED DESCRIPTION

[0050] The present disclosure provides novel double-stranded and single-stranded oligonucleotides comprising one or more nucleotide analogs. Oligonucleotides containing these analogs have superior biological activity, for example, improved in vitro stability, off-target profile and in vivo duration of action. The improved oligonucleotides are useful for silencing (e.g., reducing or eradicating) the expression of a target gene. In particular embodiments, this disclosure encompasses double-stranded RNAs (dsRNAs) comprising specific nucleotide analogs, and especially siRNAs comprising specific nucleotide analogs, that can hybridize to messenger RNAs (mRNAs) of interest, so as to reduce or block the expression of target genes of interest. According to most preferred embodiments, the said specific nucleotide analogs have the ribose sugar ring replaced by a six-membered heterocyclic ring. As described further in detail in the present disclosure, the six-membered heterocyclic group of the said specific nucleotide analogs may be a dioxane or a morpholino ring. Where the heterocyclic group is a morpholino-ring, the nitrogen atom is either substituted or non-substituted. In some embodiments, the six-membered heterocyclic group may be substituted by linear or cyclic groups and/or targeting moieties.

[0051] Definitions

[0052] The terms used in this specification generally have their ordinary meanings in the art. Certain terms are discussed below, or elsewhere in the present disclosure, to provide additional guidance in describing the products and methods of the presently disclosed subject matter.

[0053] The following definitions apply in the context of the present disclosure:

[0054] As used in this specification and the appended claims, the singular forms “a”, “an” and “the” include plural referents unless the content clearly dictates otherwise.

[0055] The term “about” as used herein refers to the usual error range for the respective value readily known to the skilled person in this technical field. Reference to “about” a value or parameter herein includes (and describes) embodiments that are directed to that value or parameter per se. In some embodiments, the term “about” refers to ±10% of a given value. However, whenever the value in question refers to an indivisible object, such as a nucleotide or other object that would lose its identity once subdivided, then “about” refers to ±1 of the indivisible object.

[0056] It is understood that aspects and embodiments of the present disclosure described herein include “having,” “comprising,” “consisting of,” and “consisting essentially of” aspects and embodiments. The words “have” and “comprise,” or variations such as “has,” “having,” “comprises,” or “comprising,” will be understood to imply the inclusion of the stated element(s) (such as a composition of matter or a method step) but not the exclusion of any other elements. The term “consisting of” implies the inclusion of the stated element(s), to the exclusion of any additional elements. The term “consisting essentially of” implies the inclusion of the stated elements, and possibly other element(s) where the other element(s) do not materially affect the basic and novel characteristic(s) of the invention.

[0057] An “alkyl,” unless otherwise specified, means an aliphatic hydrocarbon group which may be linear or branched, having 1 to 20 (e.g., 1-5, 1-10, or 1-15) carbon atoms in the chain.

[0058] “Branched” means that one or more alkyl groups such as a methyl, ethyl or propyl group are attached to a linear alkyl chain. Exemplary linear or branched alkyl groups include methyl, ethyl, n-propyl, i-propyl, n-butyl, t-butyl, n-pentyl, 3-pentyl, octyl, nonyl, and decyl.

[0059] A “cycloalkyl” means a cyclic saturated alkyl group as defined above. Examples are, but not limited to, cyclopropyl, cyclobutyl, cyclopentyl, cyclohexyl, cycloheptyl, and cyclooctyl.

[0060] An “alkoxy” is defined as a —OR group, wherein R is an alkyl group as defined above, including a cycloalkyl group. Examples are, but not limited to, methoxy, ethoxy, 1-propoxy, 2-propoxy, butoxy, and pentoxy.

[0061] A “halogen atom” refers to a fluorine, chlorine, bromine, or iodine atom. In some embodiments, a fluorine or chlorine atom may be preferred.

[0062] An “aryl,” unless otherwise specified, means an aromatic monocyclic or multicyclic hydrocarbon ring system of 6 to 14 carbon atoms, e.g., 6 to 10 carbon atoms. Exemplary aryl groups include phenyl and naphthyl groups.

[0063] A “heterocycle” or “heterocyclic” refers to a saturated, partially unsaturated or unsaturated, carbocyclic group containing at least one heteroatom selected from the group of oxygen, nitrogen, selenium, phosphorus, and sulfur. The nitrogen, selenium, phosphorus or sulfur may optionally be oxidized and the nitrogen may optionally be quaternized. For example, the heterocycle can be a stable ring wherein at least one member of the ring is a heteroatom. In some embodiments, the heterocycle may have 3 to 14 e.g., 5 to 7, or 5 to 10) members and may have one, two, or multiple rings (i.e., mono-, bi- or multi-cyclic rings). In particular embodiments, the heteroatoms are oxygen, nitrogen and sulfur. The number of heteroatoms may vary, e.g., from one to three. Suitable heterocycles are also disclosed in The Handbook of Chemistry and Physics, 76^{th} Edition, CRC Press, Inc., 1995-1996, pppp. 2-25 to 2-26, the disclosure of which is hereby incorporated by reference. In some embodiments, the heterocycles are non-aromatic heterocycles, which include, but are not limited to, pyrrolidinyl, pyrazolidinyl, imidazolidinyl, oxiranyl, tetrahydrofuranyl, dioxolanyl, tetrahydro-pyranyl, dioxanyl, dioxolanyl, piperidyl, piperazinyl, morpholinyl, pyranyl, imidazolinyl, pyrrolinyl, pyrazolinyl, thiazolidinyl, tetrahydrothiopyranyl, dithianyl, thiomorpholinyl, dihydro-pyranyl, tetrahydropyranyl, dihydropyranyl, tetrahydro-pyridyl, dihydropyridyl, tetrahydropyrinidinyl, dihydrothiopyranyl, and azepanyl, as well as the fused systems resulting from the condensation with a phenyl group.

[0064] A “heteroaryl” refers to an aromatic heterocyclic ring with 5 to 14 (e.g., 5 to 7, or 5 to 10) members and may be a mono-, bi- or multi-cyclic ring. The number of heteroatoms may typically vary from one to three heteroatoms, for example, selected from N and O. Examples of heteroaryl groups include pyrrolyl, pyridyl, pyrazolyl, thienyl, pyrimidinyl, pyrazinyl, tetrazolyl, indolyl, quinolinyl, purinyl, imidazolyl, thienyl, thiazolyl, benzothiazolyl, furanyl, benzofuranyl, 1,2,4-thiadiazolyl, oxadiazol, isothiazolyl, triazoyl, tetrazolyl, isoquinolyl, benzothienyl, isobenzofuryl, pyrazolyl, carbazolyl, benzimidazolyl, isoxazolyl, and pyridyl-N-oxide, as well as the fused systems resulting from the condensation with a phenyl group. In particular embodiments, a heteroaryl is a 5- or 6-membered heteroaryl comprising one or more heteroatoms, e.g., one to three heteroatoms selected from N and O. “Alkyl”, “cycloalkyl”, “alkenyl”, “alkynyl”, “aryl”, “heteroaryl”, and “heterocyclyl” refer also to the corresponding “alkylene”, “cycloalkylene”, “alkenylene”, “alkynylene”, “arylene”, “heteroarylene”, and “heterocyclene” which are formed by the removal of two hydrogen atoms.

[0065] The term “heterocyclic nucleobase” means any nitrogen-containing heterocyclic moiety capable of forming Watson-Crick-type hydrogen bonds and stacking interactions in pairing with a complementary nucleobase or nucleobase analog (i.e., derivatives of nucleobases) when that nucleobase is incorporated into a polymeric structure.

[0066] Unless otherwise specified, the term “heterocyclic nucleobase” refers herein to an optionally substituted, nitrogen-containing heterocyclic group that can be attached to an optionally substituted dioxane ring or to an optionally substituted morpholino ring, according to the present disclosure. In some embodiments, the heterocyclic nucleobase can be selected from an optionally substituted purine-base or an optionally substituted pyrimidine-base. The term “purine-base” is used herein in its ordinary sense as understood by those skilled in the art, and includes its tautomers. Similarly, the term “pyrimidine-base” is used herein in its ordinary sense as understood by those skilled in the art, and includes its tautomers. A non-limiting list of optionally substituted purine-bases includes purine, adenine, guanine, hypoxanthine, xanthine, alloxanthine, 7-alkylguanine (e.g., 7-methylguanine), theobromine, caffeine, uric acid and isoguanine. Examples of pyrimidine-bases include, but are not limited to, cytosine, thymine, uracil, 5,6-dihydrouracil and 5-alkylcytosine (e.g., 5-methylcytosine). Other non-limiting examples of heterocyclic nucleobases include diaminopurine, 8-oxo-N₆ alkyladenine (e.g., 8-oxo-N₆ methyladenine), 7-deazaxanthine, 7-deazaguanine, 7-deazaadenine, N₄,N₄-ethanocytosin, N₆,N₆-ethano-2,6-diaminopurine, 5-halouracil (e.g., 5-fluorouracil and 5-bromouracil), pseudoisocytosine, isocytosine, isoguanine, 1,2,4-triazole-3-carboxamides and other heterocyclic nucleobases described in U.S. Pat. Nos. 5,432,272 and 7,125,855, which are incorporated herein by reference disclosing additional heterocyclic bases. In some embodiments, a heterocyclic nucleobase can be optionally substituted with an amine- or an enol protecting group(s).

[0067] The terms “protecting group” and “protecting groups” as used herein refer to any atom or group of atoms that is added to a molecule in order to prevent existing groups in the molecule from undergoing unwanted chemical reactions. A “protecting group” may be a labile chemical moiety that is known in the art to protect reactive groups, such as hydroxyl, amino, thiol, carboxylic acids or phosphate groups, against undesired or untimely reactions during chemical synthesis. Protecting groups are typically used selectively and/or orthogonally to protect sites during reactions at other reactive sites and can then be removed to leave the unprotected group as it is or available for further reactions.

[0068] Examples of protecting group moieties are described in T. W. Greene and P. G. M. Wuts, Protective Groups in Organic Synthesis, 3. Ed. John Wiley & Sons, 1999, and in J. F. W. McOmie, Protective Groups in Organic Chemistry Plenum Press, 1973, both of which are hereby incorporated by reference for the limited purpose of disclosing suitable protecting groups. The protecting group moiety may be chosen in such a way, that they are stable to certain reaction conditions and readily removed at a convenient stage using methodology known from the art.

[0069] A non-limiting list of protecting groups include benzyl; substituted benzyl; alkylcarbonyls and alkoxycarbonyls (e.g., t-butoxycarbonyl (BOC), acetyl, or isobutyryl); arylalkylcarbonyls and arylalkoxycarbonyls (e.g., benzyloxycarbonyl); substituted methyl ether (e.g. methoxymethyl ether); substituted ethyl ether; a substituted benzyl ether; tetrahydropyranyl ether; silylether (e.g., trimethylsilyl, triethylsilyl, triisopropylsilyl, t-butyldimethylsilyl, tri-iso-propylsilyloxymethyl, [2-(trimethylsilyl)ethoxy]methyl or t-butyldiphenylsilyl); esters (e.g. benzoate ester, 2-cyanoethylphosphates); carbonates (e.g. methoxymethylcarbonate); sulfonates (e.g. tosylate or mesylate); acyclic ketal (e.g. dimethyl acetal); cyclic ketals (e.g., 1,3-dioxane, 1,3-dioxolanes, and those described herein); acyclic acetal; cyclic acetal (e.g., those described herein); acyclic hemiacetal; cyclic hemiacetal; cyclic dithioketals (e.g., 1,3-dithiane or 1,3-dithiolane); orthoesters (e.g., those described herein) and triarylmethyl groups (e.g., trityl; monomethoxytrityl (MMT); 4,4′-dimethoxytrityl (DMT); 4,4′,4″-trimethoxytrityl (TMT); and those described herein).

[0070] Preferred protecting groups are selected from a group comprising acteyl (Ac), benzoyl (Bzl), isobutyryl (iBu), phenylacetyl, dimethoxytrityl (DMT), methoxytrityl (MMT), triphenylmethyl (Trt), N,N-dimethylformamidine and 2-cyanoethyl (CE).

[0071] Unless indicated otherwise, the abbreviations for any protective groups, amino acids and other compounds are in accordance with their common usage, recognized abbreviations, or the IUPAC-IUB Commission on Biochemical Nomenclature (See, Biochem. 11:942-944 (1972).

[0072] As used herein, the term “solid support” (also called resins) means the insoluble particles, typically 50-200 μm in diameter, to which the oligonucleotide is bound during synthesis. Many types of solid support have been used, but controlled pore glass (CPG) and polystyrene (highly cross-linked polystyrene beads) have proved to be particularly useful. Controlled pore glass is rigid and non-swelling with deep pores (pore sizes between 500 and 1000 Å), in which oligonucleotide synthesis takes place. Solid supports for conventional oligonucleotide synthesis are commercially available and typically manufactured with a loading of 20-40 μmol of nucleoside per gram of resin in the case of CPG solid support. Polystyrene-based solid supports show higher loadings with up to 300 μmol per gram of resin. Solid support materials with standard nucleotides already attached are commercially available, amino-functionalized CPG and polystyrene materials are used for the synthesis of non-commercial building blocks as it will be shown later for the herein described building blocks. Alternatively to solid supports, which already have attached the first nucleotide building block, commercially available universal solid support materials can be used as it will be described later in the present disclosure.

[0073] As used herein, the term “ribonucleotide” or “nucleotide” includes naturally occurring or modified nucleotide, as further detailed below, or a surrogate replacement moiety. A modified nucleotide is non-naturally occurring nucleotide and is also referred to herein as a “nucleotide analog.” One of ordinary skill in the art would understand that guanine, cytosine, adenine, uracil or thymine in a nucleotide may be replaced by other moieties without substantially altering the base pairing properties of an oligonucleotide comprising a nucleotide bearing such replacement moiety. For example, without limitation, a nucleotide comprising inosine as its base may base-pair with nucleotides containing adenine, cytosine, or uracil. Hence, nucleotides containing uracil, guanine, or adenine may be replaced in the nucleotide sequences of the present disclosure by a nucleotide containing, for example, inosine. Sequences comprising such replacement moieties are included as embodiments of the present disclosure.

[0074] As used herein, a “cell targeting moiety” means a molecular group ensuring increased delivery of an siRNA, which encompasses (i) increased specificity of an siRNA to bind to selected target receptors (e.g., target proteins), including increased specificity of an siRNA to bind to cells expressing the selected target receptor; (ii) increased uptake of an siRNA by the target cells; and/or (iii) increased ability of an siRNA to be appropriately processed once it has entered into a target cell, such as increasing the intracellular release of an siRNA, e.g., by facilitating the translocation of the siRNA from transport vesicles into the cytoplasm. Thus, a cell targeting moiety is used to direct and/or deliver an oligonucleotide to a particular cell, tissue, organ, etc. A cell targeting moiety comprised in a nucleotide, a nucleotide analog or in an oligonucleotide imparts to the said nucleotide, nucleotide analog or oligonucleotide characteristics such that the said nucleotide, nucleotide analog or oligonucleotide is preferentially recognized, bound, internalized, processed, activated, etc. by the targeted cell type(s) relative to non-targeted cell types. For example, endothelial cells have a high affinity for the peptide cell targeting moiety Arg-Gly-Asp (RGD); cancer and kidney cells preferentially interact with compounds having a folic acid moiety; immune cells have an affinity for mannose; and cardiomyocytes have an affinity for the peptide WLSEAGPVVTVRALRGTGSW (SEQ ID NO: 1) (see, e.g., Biomaterials ZV-8081-8087, 2010). Other cell targeting/delivery moieties are known in the art. Accordingly, compounds comprising a cell targeting moiety preferentially interact with and are taken up by the targeted cell type(s).

[0075] A cell targeting moiety encompasses cell targeting peptide groups and cell targeting non-peptide groups.

[0076] As used herein, “target cells” or “targeted cells” refers to cells of interest. The cells may be found in vitro, in vivo, in situ or in the tissue or organ of an organism. The organism may be an animal, preferably a mammal, more preferably a human, and most preferably a human patient.

[0077] As used herein, the term “TTR” refers to the transthyretin gene or protein. As used herein, the term “TTR” includes human TTR, the amino acid and nucleotide sequences of which may be found in, for example, EMBL database under the accession number CR456908; mouse TTR, the amino acid and nucleotide sequences of which may be found in, for example, GenBank database under the accession number AAH24702. Additional examples of TTR mRNA sequences are readily available in, e.g., GenBank.

[0078] As used herein, “target sequence” refers to a contiguous nucleotide sequence found in the RNA transcript of a target gene or portions thereof, including the mRNA, which is a product of RNA processing of a primary transcription product.

[0079] As used herein, and unless otherwise indicated, the term “complementary”, when used to describe a first nucleotide sequence (e.g., an oligonucleotide) in relation to a second nucleotide sequence (e.g., an oligonucleotide), refers to the ability of the first nucleotide sequence to hybridize and form a duplex structure under certain conditions with the second nucleotide sequence, as will be understood by one of ordinary skill in the art. This includes base-pairing of the first nucleotide sequence to the second nucleotide sequence over the entire length of the first or second nucleotide sequence. Such sequences can be referred to as “fully complementary” with respect to each other herein. Where a first sequence is referred to as “substantially complementary” with respect to a second sequence herein, the two sequences can be fully complementary or they may have 70% or more nucleotide identity, while retaining the ability to hybridize under conditions most relevant to their ultimate target. However, where two oligonucleotides are designed to form, upon hybridization, one or more single-stranded overhangs, such overhangs shall not be regarded as mismatches with regard to the determination of complementarity. For example, a double-stranded RNA (dsRNA) comprising a first oligonucleotide 21 nucleotides in length and a second oligonucleotide 23 nucleotides in length, wherein the second oligonucleotide comprises a sequence of 21 nucleotides that is fully complementary to the first oligonucleotide, may yet be referred to as “fully complementary” for the purpose of the present disclosure. “Complementary” sequences may also include or be formed entirely from non-Watson-Crick base pairs and/or base pairs formed from non-natural and modified nucleotides, insofar as the above requirements with respect to their ability to hybridize are fulfilled. The terms “complementary”, “fully complementary”, and “substantially complementary” may be used with respect to the base matching between the sense strand and the antisense strand of a dsRNA, or between the antisense strand of a dsRNA and a target sequence, as it will be understood from the context of their use. As used herein, a polynucleotide which is “substantially complementary to at least a part of” an mRNA refers to a polynucleotide which is substantially complementary to a contiguous portion of the mRNA of interest. As used herein, the term “double-stranded RNA” or “dsRNA” refers to a complex of ribonucleic acid molecule(s), having a duplex structure comprising two anti-parallel and substantially complementary, as defined above, nucleic acid strands. The two strands forming the duplex structure may be different portions of one larger RNA molecule, or they may be separate RNA molecules. Where separate RNA molecules, such dsRNA may be referred to in the literature as short interfering RNA (siRNA). Where two strands are part of one larger molecule, and therefore are connected by an uninterrupted chain of nucleotides between the 3′-end of a first strand and the 5′-end of a second strand forming the duplex structure, the connecting RNA chain is referred to as a “hairpin loop”, “short hairpin RNA”, or “shRNA”. Where the two strands are connected covalently by means other than an uninterrupted chain of nucleotides between the 3′-end of a first strand and the 5′-end of a second strand forming the duplex structure, the connecting structure is referred to as a “linker”. The RNA strands may have the same or a different number of nucleotides. The maximum number of base pairs is the number of oligonucleotides in the shortest strand of the dsRNA minus any overhangs that are present in the duplex. In addition to the duplex structure, a dsRNA may comprise one or more nucleotide overhangs. In addition, as used herein, the term “dsRNA” may include chemical modifications to ribonucleotides, including substantial modifications at multiple nucleotides and including all types of modifications disclosed herein or known in the art. Any such modifications, as used in a siRNA type molecule, are encompassed by “dsRNA” for the purposes of the present disclosure. In some embodiments, the internucleotide linkages in the dsRNA may be modified, e.g., as described herein.

[0080] Within the scope of the present disclosure, the “percentage identity” between two sequences of nucleic acids means the percentage of identical nucleotides residues between the two sequences to be compared, obtained after optimal alignment, this percentage being purely statistical and the differences between the two sequences being distributed randomly along their length. The comparison of two nucleic acid sequences is traditionally carried out by comparing the sequences after having optimally aligned them, said comparison being able to be conducted by segment or by using an “alignment window”. Optimal alignment of the sequences for comparison can be carried out, in addition to comparison by hand, by means of the local homology algorithm of Smith and Waterman (1981), by means of the local homology algorithm of Neddleman and Wunsch (1970), by means of the similarity search method of Pearson and Lipman (1988)), or by means of computer software using these algorithms (GAP, BESTFIT, FASTA and TFASTA in the Wisconsin Genetics Software Package, Genetics Computer Group, 575 Science Dr., Madison, Wis., or by the comparison software BLAST NR or BLAST P).

[0081] The percentage identity between two nucleic acid sequences is determined by comparing the two optimally aligned sequences in which the nucleic acid sequence to compare can have additions or deletions compared to the reference sequence for optimal alignment between the two sequences. Percentage identity is calculated by determining the number of positions at which the nucleotide residue is identical between the two sequences, preferably between the two complete sequences, dividing the number of identical positions by the total number of positions in the alignment window and multiplying the result by 100 to obtain the percentage identity between the two sequences.

[0082] As intended herein, nucleotide sequences having at least 70% nucleotide identity with a reference sequence encompass those having at least 71%, 72%, 73%, 74%, 75%, 76%, 77%, 78%, 79%, 80%, 81%, 82%, 83%, 84%, 85%, 86%, 87%, 88%, 89%, 90%, 91%, 92%, 93%, 94%, 95%, 96%, 97%, 98% and 99% nucleotide identity with the said reference sequence.

[0083] In some embodiments, the dsRNA comprises a modified ribonucleoside including a deoxyribonucleoside, including, for example, a deoxyribonucleoside overhang(s), one or more deoxyribonucleosides within the double-stranded portion of a dsRNA, and the like. However, it is self-evident that under no circumstances is a double-stranded DNA molecule encompassed by the term “dsRNA”.

[0084] As used herein, the term “nucleotide overhang” refers to the unpaired nucleotide or nucleotides that protrude from the duplex structure of a dsRNA when a 3′-end of a first strand of the dsRNA extends beyond the 5′ end of a second strand, or vice versa. “Blunt” or “blunt-end” means that there are no unpaired nucleotides at that end of the dsRNA, i.e., no nucleotide overhang. A “blunt-ended” dsRNA is a dsRNA that is double-stranded over its entire length, i.e., no nucleotide overhang at either end of the molecule. For clarity, chemical caps or non-nucleotide chemical moieties conjugated to the 3′ end and/or the 5′ end of a strand of a dsRNA are not considered in determining whether a dsRNA has an overhang or is blunt-ended.

[0085] As used herein, the term “contiguous nucleotides” refers to nucleotides, either natural nucleotides or modified nucleotides, that are linked, one to another, through an internucleotide linkage. Thus, two contiguous nucleotides are linked, one to the other, through an internucleotide linkage. Also, three contiguous nucleotides mean a stretch of three nucleotides wherein the first nucleotide is linked to the second nucleotide through an internucleotide linkage and wherein the second nucleotide is linked to the third nucleotide also through an internucleotide linkage. Within the said stretch of three nucleotides that are located successively in an oligonucleotide, the said three nucleotides are termed “contiguous nucleotides”. Illustratively, an oligonucleotide comprising ten contiguous nucleotide analogs consists of an oligonucleotide comprising in its sequence an uninterrupted stretch of ten nucleotide analogs that are linked, one to another, through an internucleotide linage.

[0086] As used herein, the term “antisense strand” or “antisense strand oligonucleotide” in a dsRNA refers to the strand of the dsRNA containing a sequence that is substantially complementary to a target nucleotide sequence. The other strand in the dsRNA is the “sense strand”, which may also be termed “sense strand oligonucleotide”. In a double-stranded oligonucleotide, including in a dsRNA, the antisense strand comprises a nucleotide region, which is termed the “hybridizing region” herein, which is paired with a region of the sense strand (the latter being the hybridizing region of the sense strand). The antisense strand may further comprise regions located at the 5′-end and/or at the 3′-end that are unpaired with the sense strand. In embodiments of a dsRNA wherein the said dsRNA consists of a siRNA, this unpaired region is conventionally termed a “nucleotide overhang” or a “overhang”, i.e. a “5′-nucleotide overhang” or a “3′-nucleotide overhang”. Usually, a nucleotide overhang has 1 to 8 nucleotides in length, which encompasses 1, 2, 3, 4, 5, 6, 7 and 8 nucleotides in length. In most embodiments, a nucleotide overhang has 2 to 3 nucleotides in length. Symmetrically, the sense strand of a double-stranded oligonucleotide, including of a dsRNA, comprises a hybridizing region which hybridizes with the hybridizing region of the antisense strand. The sense strand may also further comprise a 5′-nucleotide overhang and/or a 3′-nucleotide overhang. The hybridizing region of the antisense strand of a double-stranded oligonucleotide, although it is paired with a region of the sense strand may, in some embodiments, not be fully complementary to the said region of the sense strand, which means that, when hybridized, some mismatches (i.e. some unpaired nucleotides) may be present between the hybridizing region of the antisense strand oligonucleotide and the said paired region of the sense strand oligonucleotide. Typically, in some of those embodiments, one to three mismatches may be present between the hybridizing region of the antisense strand oligonucleotide and the paired region of the sense strand oligonucleotide.

[0087] As used herein, the term “introducing into a cell” means facilitating uptake or absorption into the cell, as would be understood by one of ordinary skill in the art. Absorption or uptake of dsRNA can occur through unaided diffusive or active cellular processes, or by auxiliary agents or devices. The meaning of this term is not to be limited to a cell in vitro; a dsRNA may also be “introduced into a cell”, wherein the cell is part of a living organism. In such an instance, introduction into the cell will include delivery to the organism. For example, for in vivo delivery, dsRNA can be injected into a tissue site or administered systemically. In vivo delivery can also be mediated by a beta-glucan delivery system (See, e.g., Tesz, G. J. et al., 2011, Biochem J. 436(2):351-62). In vitro introduction into a cell includes methods known in the art such as electroporation and lipofection. Further approaches are described herein below or known in the art.

[0088] As used herein, the terms “inhibit the expression of” or “inhibiting expression of” insofar as they refer to a target gene, refer to the at least partial suppression of the expression of the target gene, as manifested by a reduction of the amount of mRNA transcribed from the target gene.

[0089] As used herein, the term “inhibiting” is used interchangeably with “reducing”, “silencing”, “downregulating”, “suppressing”, “knock-down” and other similar terms, and include any level of inhibition. The degree of inhibition is usually expressed in terms of (((mRNA in control cells)−(mRNA in treated cells))/(mRNA in control cells))·100%. Alternatively, the degree of inhibition may be given in terms of a reduction of a parameter that is functionally linked to a target gene transcription, e.g., the amount of protein encoded by the target gene which is secreted by a cell, or the number of cells displaying a certain phenotype, e.g., apoptosis. In principle, target gene silencing may be determined in any cell expressing the target, either constitutively or by genomic engineering, and by any appropriate assay. However, when a reference is needed in order to determine whether a given dsRNA inhibits the expression of the target gene by a certain degree and therefore is encompassed by the present disclosure, the assays provided in the Examples below shall serve as such a reference.

[0090] As used herein, in the context of a target gene expression, the terms “treat”, “treatment” and the like refer to relief from or alleviation of pathological processes mediated by the expression of a target gene. In the context of the present disclosure, insofar as it relates to any of the other conditions recited herein below (other than pathological processes mediated by target expression), the terms “treat”, “treatment”, and the like refer to relieving or alleviating one or more symptoms associated with such condition.

[0091] As used herein, the terms “prevent” or “delay progression of” (and grammatical variants thereof) with respect to a disease or disorder relate to prophylactic treatment of a disease, e.g., in an individual suspected to have the disease, or at risk for developing the disease. Prevention may include, but is not limited to, preventing or delaying onset or progression of the disease and/or maintaining one or more symptoms of the disease at a desired or sub-pathological level.

[0092] As used herein, the terms “therapeutically effective amount” and “prophylactically effective amount” refer to an amount that provides a therapeutic benefit in the treatment, prevention, or management of pathological processes mediated by target gene expression, or an overt symptom of pathological processes mediated by the expression of a target gene. The specific amount that is therapeutically effective can be readily determined by an ordinary medical practitioner, and may vary depending on factors such as the type and stage of pathological processes mediated by the target gene expression, the patient's medical history and age, and the administration of other therapeutic agents that inhibit biological processes mediated by the target gene.

[0093] As used herein, the term “individual” or “subject” is a mammal. Mammals include, but are not limited to, domesticated animals (e.g., cows, sheep, cats, dogs, and horses), primates (e.g., humans and non-human primates such as monkeys), rabbits, and rodents (e.g., mice and rats). In some embodiments, the individual or subject is a human.

[0094] The terms “internucleoside linkage,” “internucleoside linking group,” “internucleotide linkage”, or “internucleotide linking group” are used herein interchangeably and refer to any linker or linkage between two nucleoside (i.e., a heterocyclic base moiety and a sugar moiety) units, as is known in the art, including, for example, but not as limitation, phosphate, analogs of phosphate (i.e., phosphodiester- or phosphotriester moieties), phosphorothioate, phosphonate, guanidium, hydroxylamine, hydroxylhydrazinyl, amide, carbamate, alkyl, and substituted alkyl linkages. An “internucleoside linking group” may be involved in the linkage between two nucleosides, between two nucleoside analogs or between a nucleoside and a nucleoside analog.

[0095] Internucleoside linkages constitute the backbone of a nucleic acid molecule. An internucleoside linking group refers to a chemical group linking two adjacent nucleoside residues comprised in a nucleic acid molecule, which encompasses (i) a chemical group linking two adjacent nucleoside residues, (ii) a chemical group linking a nucleoside residue with an adjacent nucleoside analog residue and (iii) a chemical group linking a first nucleoside analog residue with a second nucleoside analog residue, which nucleoside analog residues may be identical or may be distinct. Nucleoside analog residues encompass compounds of formula (I) that are disclosed herein. In one aspect, a nucleotide of an siNA molecule of the invention may be linked to an adjacent nucleotide through a linkage between the 3′-carbon of the sugar moiety of the first nucleotide and the 5′-carbon of the sugar moiety of the second nucleotide (herein referred to as a 3′ internucleoside linkage). A 3′-5′ internucleoside linkage, as used herein, refers to an internucleoside linkage that links two adjacent nucleoside units, wherein the linkage is between the 3′-carbon of the sugar moiety of the first nucleoside and the 5′-carbon of the sugar moiety of the second nucleoside. In another aspect, a nucleotide (including a nucleotide analog) of an siNA molecule of the invention may be linked to an adjacent nucleotide (including a nucleotide analog) through a linkage between the 2′-carbon of the sugar moiety of the first nucleotide and the 5′-carbon of the sugar moiety of the second nucleotide (herein referred to as a 2′ internucleoside linkage). A 2′-5′ internucleoside linkage, as used herein, refers to an internucleoside linkage that links two adjacent nucleoside units, wherein the linkage is between the 2′-carbon of the sugar moiety of the first nucleoside and the 5′-carbon of the sugar moiety of the second nucleoside.

[0096] As used herein, the term “internucleoside linking group” encompasses phosphorus- and non-phosphorus-containing internucleoside linking groups.

[0097] In some embodiments, a phosphorus-containing internucleoside linking group encompasses phosphodiesters, phosphorothioates, chiral phosphorothioates, phosphorodithioates, phosphotriesters, aminoalkylphosphotriesters, methyl and other alkyl phosphonates including 3′-alkylene phosphonates, 5′-alkylene phosphonates and chiral phosphonates, phosphinates, phosphoramidates including 3′-amino phosphoramidate and aminoalkylphosphoramidates, thionophosphoramidates, thionoalkylphosphonates, thionoalkylphosphotriesters, selenophosphates and boranophosphates having normal 3′-5′ linkages, and 2′-5′ linked analogs thereof.

[0098] Representative U.S. patents that teach the preparation of the above phosphorus-containing internucleoside linkages include U.S. Pat. Nos. 3,687,808; 4,469,863; 4,476,301; 5,023,243; 5,177,196; 5,188,897; 5,264,423; 5,276,019; 5,278,302; 5,286,717; 5,321,131; 5,399,676; 5,405,939; 5,453,496; 5,455,233; 5,466,677; 5,476,925; 5,519,126; 5,536,821; 5,541,306; 5,550,111; 5,563,253; 5,571,799; 5,587,361; 5,194,599; 5,565,555; 5,527,899; 5,721,218; 5,672,697 and 5,625,050, each of which is herein incorporated by reference.

[0099] In one embodiment, non-phosphodiester backbone linkage is selected from a group consisting of phosphorothioate, phosphorodithioate, alkyl-phosphonate and phosphoramidate backbone linking groups.

[0100] In one embodiment, a phosphorus-containing internucleoside linking group encompasses phosphodiesters, phosphotriesters and phosphorothioates.

[0101] In some embodiments, oligonucleotides of the invention comprise one or more internucleoside linking groups that do not contain a phosphorus atom. Such oligonucleotides include, but are not limited to, those that are formed by short chain alkyl or cycloalkyl internucleoside linking groups, mixed heteroatom and alkyl or cycloalkyl internucleoside linking groups, or one or more short chain heteroatomic or heterocyclic internucleoside linking groups. These include those having siloxane backbones; sulfide, sulfoxide and sulfone backbones; formacetyl and thioformacetyl backbones; methylene formacetyl and thioformacetyl backbones; riboacetyl backbones; alkene containing backbones; sulfamate backbones; methyleneimino and methylenehydrazino backbones; sulfonate and sulfonamide backbones; amide backbones; and others having mixed N, O, S and CH2 component parts. Representative U.S. patents that teach the preparation of the above non-phosphorus containing internucleoside linking group include, but are not limited to, U.S. Pat. Nos. 5,034,506; 5,166,315; 5,185,444; 5,214,134; 5,216,141; 5,235,033; 5,264,562; 5,264,564; 5,405,938; 5,434,257; 5,466,677; 5,470,967; 5,489,677; 5,541,307; 5,561,225; 5,596,086; 5,602,240; 5,610,289; 5,602,240; 5,608,046; 5,610,289; 5,618,704; 5,623,070; 5,663,312; 5,633,360; 5,677,437; 5,792,608; 5,646,269 and 5,677,439, each of which is herein incorporated by reference.

[0102] In one embodiment, oligonucleotides of the invention comprise one or more neutral internucleoside linking groups that are non-ionic. Neutral internucleoside linking groups encompass nonionic linking groups comprising siloxane (dialkylsiloxane), carboxylate ester, carboxamide, sulfide, sulfonate ester and amides (See for example: Carbohydrate Modifications in Antisense Research; Y. S. Sanghvi and P. D. Cook Eds. ACS Symposium Series 580; Chapters 3 and 4, (pp. 40-65)). Further neutral internucleoside linking groups encompass nonionic linkages comprising mixed N, O, S and CH2 component parts.

[0103] Double-Stranded Oligonucleotides, such as Double-Stranded RNAs (dsRNAs)

[0104] As previously specified in the present description, double-stranded oligonucleotides according to the present disclosure, which encompasses dsRNAs, comprise a sense strand oligonucleotide and an antisense strand oligonucleotide, wherein the antisense strand oligonucleotide hybridizes with the sense strand oligonucleotide through a hybridizing region comprised therein. Symmetrically, the sense strand oligonucleotide also comprises a hybridizing region which hybridizes with the hybridizing region comprised in the antisense strand oligonucleotide. In some embodiments, the antisense strand oligonucleotide further comprises, at the 5′-end thereof, at the 3′-end thereof, or both at the 5′-end thereof and at the 3′-end thereof, a nucleotide region which is unhybridized with the sense strand oligonucleotide, which unhybridized region is termed “nucleotide overhang” or alternatively “overhang” herein. Also, the sense strand oligonucleotide may further comprise, at the 5′-end thereof, at the 3′-end thereof, or both at the 5′-end thereof and at the 3′-end thereof, a nucleotide region which is unhybridized with the antisense strand oligonucleotide, which unhybridized region is termed “nucleotide overhang” or alternatively “overhang” herein.

[0105] In preferred embodiments of a double-stranded oligonucleotide according to the present disclosure, the hybridizing region comprised in the antisense strand oligonucleotide is fully complementary with the hybridizing region comprised in the sense strand oligonucleotide.

[0106] The antisense strand oligonucleotide may further comprise regions located at the 5′-end thereof, at the 3′-end thereof, or both at the 5′-end and at the 3′-end thereof, that are unpaired with the sense strand. In embodiments of the antisense strand oligonucleotide of a dsRNA wherein the said dsRNA consists of a siRNA, the said 3′-end or 5′-end region which is unpaired with the sense strand oligonucleotide is conventionally termed a “nucleotide overhang” or a “overhang”, i.e. a “5′-nucleotide overhang” or a “3′-nucleotide overhang”. In preferred embodiments of a double-stranded oligonucleotide according to the present disclosure, a nucleotide overhang, when present in the sense strand oligonucleotide or in the antisense strand oligonucleotide, has from 1 to 8 nucleotides in length, which encompasses 1, 2, 3, 4, 5, 6, 7 and 8 nucleotides in length. In most embodiments, a nucleotide overhang has two to three nucleotides in length.

[0107] The present inventors have found that, in the hybridizing region comprised in the antisense strand oligonucleotide of a double-stranded oligonucleotide comprising a sense strand oligonucleotide and an antisense strand oligonucleotide, and especially in a double-stranded oligonucleotide that is useful as a siRNA, the presence of specific nucleotide analogs of formula (I-A) as described in the present disclosure allows a high stability of the said double-stranded oligonucleotide leading to long durations of actions in-vivo. Further, it is shown herein that, in embodiments wherein the said double-stranded oligonucleotide is a siRNA, the presence of one or more nucleotide analogs of formula (I-A) as described herein in the hybridizing region of the antisense strand oligonucleotide, at locations other than in the 5′-overhang or at the 3′-overhang, imparts to the said siRNA an improved property of inhibiting the expression of a target gene, an improved duration of its gene expression inhibition properties and especially an improved specificity of the antisense strand oligonucleotide for the targeted sequence. As shown in the examples herein, an improved specificity encompasses an improved property of the antisense strand oligonucleotide to hybridize with a target oligonucleotide, while reducing the number of off-target events.

[0108] The examples herein show that double-stranded oligonucleotides comprising an antisense strand oligonucleotide and a sense strand oligonucleotide, and wherein have been incorporated one or more nucleotide analogs of formula (I-A) in the hybridizing region of the antisense strand oligonucleotide and at locations distinct from the 3′-overhang or the 5′-overhang thereof, allow generating siRNA duplex structures that possess stabilities and specificities required for ensuring an efficient inhibition of a target gene. It is also shown herein that the efficient inhibition of a target gene is accompanied by a reduction in the number of off target events.

[0109] Unexpectedly, the inventors have shown that a high metabolic stability of siRNA duplexes comprising one or more nucleotide analogs of formula (I-A) or (I-B) of the present disclosure is obtained, when the nucleotide analogs of formula (I-A) or (I-B) are linked, one with another or one with a ribose-containing nucleotide, through conventional phosphodiester bonds. It has been unexpectedly shown that, when nucleotide analogs of formula (I-A) or (I-B) are linked through conventional phosphodiester bonds within an oligonucleotide, forming a strand of a siRNA, the resulting siRNA duplex possesses a higher stability against nuclease degradation, which results in a longer duration of action in-vivo than the same siRNA with phosphorothioate-linked deoxyribonucleotides instead of the nucleotide analogs of formula (I-A) or (I-B).

[0110] This high increase in the in vivo duration of action of nucleotide analogs of formula (I-A) or (I-B), when linked through a phosphodiester bond, is a clear technical advantage since stabilization through modified internucleotide linking phosphorous-groups such as phosphorothioates may be avoided. It is herein reminded that such non-conventional phosphorothioates introduce a chiral center, which leads to undesirable diastereomeric mixtures of the resulting siRNA. The latter may change the siRNA binding properties, potentially leading to an increase of off-target events. It is also shown herein that siRNAs having one or more compounds of formula (I-A) or (I-B) have a good target gene silencing activity in vitro and in vivo, even when the siRNAs are internalized by target cells in the absence of any transfection agent.

[0111] As it is described in the literature, the incorporation of duplex destabilizing, modified nucleotides into the antisense strand of a double stranded oligonucleotide leads to an improved off-target profile and therefore less side effects of the corresponding siRNAs (see e.g. Nucleic Acid Research, 2010, 38 (17), 5761-5773).

[0112] It was therefore more surprising, that incorporation of the herein described nucleotide analogs of formula (I-A) at specific positions in the antisense strand oligonucleotide, i.e. in the hybridizing region of the antisense strand oligonucleotide and at locations other than the 5′-overhang or the 3′-overhang of the said antisense strand oligonucleotide, showed highly duplex destabilizing properties in the (2S,6R)-diastereomeric series and significantly less pronounced duplex destabilization for the analogues (2R,6R)-diastereomers. In contrast to the expectations, the siRNAs having (2R,6R)-diastereoisomers analogs of formula (I-A) included in the hybridizing region of the antisense strand oligonucleotide, show significantly reduced off-target binding in an in vitro system, while keeping their highly potent target inhibiting properties in vivo.

[0113] Importantly, siRNAs having incorporated therein one or more nucleotide analogs of formula (I-A) in the hybridizing region of the antisense strand oligonucleotide are devoid of in vivo side effects at a dose range where those siRNAs are shown to exert a target gene silencing effect.

[0114] Without wishing to be bound by any particular theory, the inventors believe that the nucleotide analogs of formula (I-A) as described herein are endowed with specific physico-chemical properties imparting to an oligonucleotide comprising one or more nucleotide analogs of formula (I-A) the improved stability, binding properties and off-target profile which are shown in the examples. These properties are particularly improved in the double-stranded oligonucleotides wherein the hybridizing region of the antisense strand oligonucleotide comprises, as nucleotide analogs of formula (I-A), the (2R,6R) diastereoisomers thereof.

[0115] Nucleotide analogs of formula (I-A) as described in the present disclosure may also be termed “non-targeted” nucleotide analogs of formula (I-A) herein.

### Embodiments of the Antisense Strand of Double-Stranded Oligonucleotides

[0116] An important aspect of the present disclosure is the provision of double-stranded oligonucleotides comprising a sense strand oligonucleotide and an antisense strand oligonucleotide and wherein the antisense strand oligonucleotide comprises one or more nucleotide analogs of formula (I-A) as described herein, which nucleotide analogs are neither the 5′-overhang nucleotides nor the 3′-overhang nucleotides of the said antisense strand oligonucleotide. In some embodiments, the said double-stranded oligonucleotide consists of a siRNA that hybridizes to a selected target mRNA.

[0117] As used herein, a nucleotide which is comprised in the antisense strand oligonucleotide of a double-stranded oligonucleotide as described herein and which is not comprised in the 5′-overhang, when present, nor in the 3′-overhang, when present, may be termed a “hybridizing nucleotide” herein, or may be alternatively termed “internal nucleotide”.

[0118] Thus, a nucleotide analog of formula (I-A) which is comprised in the antisense strand oligonucleotide of a double-stranded oligonucleotide as described herein and which is not comprised in the 5′-overhang, when present, nor in the 3′-overhang, when present, may be termed an “hybridizing nucleotide” of formula (I-A) herein, or alternatively an “internal nucleotide” of formula (I-A) herein.

[0119] Similarly, a nucleotide which is comprised in the sense strand oligonucleotide of a double-stranded oligonucleotide as described herein and which is not comprised in the 5′-overhang, when present, nor in the 3′-overhang, when present, may also be termed a “hybridizing nucleotide” herein or alternatively termed “internal nucleotide”.

[0120] Further, a nucleotide which is located within the 5′-overhang or within the 3′-overhang, when present, of the said antisense strand oligonucleotide of a double stranded oligonucleotide according to the present disclosure, may be termed a “overhang” nucleotide herein.

[0121] In some embodiments of a double-stranded oligonucleotide where the antisense strand oligonucleotide comprises a 5′-overhang and/or a 3′-overhang, the antisense strand oligonucleotide does not comprise any nucleotide analog of formula (I-A) at the 5′-overhang thereof, or at the 3′-overhang thereof, or both at the 5′-overhang thereof and at the 3′-overhang thereof. Then, nucleotide analogs of formula (I-A) comprised in the said antisense strand oligonucleotide are all hybridizing nucleotide analogs of formula (I-A), in reference of the previously specified definition of a “hybridizing nucleotide” herein.

[0122] In some other embodiments of a double-stranded oligonucleotide wherein the antisense strand oligonucleotide comprises a 5′-overhang and/or a 3′-overhang, the antisense strand oligonucleotide may further comprise one or more nucleotide analogs of formula (I-A) at the 5′-overhang thereof, or at the 3′-overhang thereof, or both at the 5′-overhang thereof and at the 3′-overhang thereof.

[0123] In the present description, the terms “hybridizing” nucleotide or “overhang” nucleotide, as defined in the present disclosure, may be used for reasons of language simplification and clarity improvement of the features of the various disclosed embodiments.

[0124] The number of hybridizing nucleotide analogs of formula (I-A) comprised in the antisense strand oligonucleotide of a double-stranded oligonucleotide may vary.

[0125] In some embodiments, the antisense strand oligonucleotide comprises from 1 to 10 hybridizing nucleotide analogs of formula (I-A). As used herein, from 1 to 10 nucleotide analogs of formula (I-A) encompasses 1, 2, 3, 4, 5, 6, 7, 8, 9 or 10 nucleotide analogs of formula (I-A).

[0126] In some embodiments, the antisense strand oligonucleotide comprises from 1 to 5 hybridizing nucleotide analogs of formula (I-A).

[0127] In some embodiments, the said antisense strand oligonucleotide that comprises one or more nucleotide analogs of formula (I-A) ranges from 9 to 36 nucleotides in length, which encompasses from 15 to 30 nucleotides in length. In some embodiments, the said antisense strand oligonucleotide ranges from 20 to 25 nucleotides in length, which encompasses from 17 to 25 nucleotides in length.

[0128] In some embodiments, the (2R,6R) stereoisomer of a hybridizing nucleotide analog of formula (I-A) described herein is preferred.

[0129] Location of the nucleotide analogs of formula (I-A) within the antisense strand oligonucleotide. The one or more hybridizing nucleotide analogs of formula (I-A) may be located at various nucleotide positions within the hybridizing sequence of the antisense strand oligonucleotide.

[0130] Further, in embodiments wherein the antisense strand oligonucleotide comprises two or more hybridizing nucleotide analogs of formula (I-A), the said two or more hybridizing nucleotide analogs of formula (I-A) may be located successively and/or non-successively, at any location of the hybridizing region of the said antisense strand oligonucleotide, thus except at the 5′-overhang or at the 3′-overhang therof, when one or both overhangs are present.

[0131] In some embodiments of the said antisense strand oligonucleotide, each hybridizing nucleotide analog of formula (I-A) comprised therein is linked to a nucleotide distinct from a modified nucleotide of formula (I-A). According to these embodiments, the two or more hybridizing nucleotide analogs of formula (I-A) are separated, i.e. are separately distributed, within the hybridizing sequence of the antisense strand oligonucleotide.

[0132] In some other embodiments of the said antisense strand oligonucleotide, all the hybridizing nucleotide analogs of formula (I-A) comprised therein are linked together, so as they are located successively within the antisense strand oligonucleotide. In these embodiments, the hybridizing nucleotide analogs of formula (I-A) located at the 5′-end of this succession of the said hybridizing nucleotide analogs are linked to a nucleotide distinct from a nucleotide analog of formula (I-A) and the hybridizing nucleotide analogs of formula (I-A) located at the 3′-end of this succession of the said hybridizing nucleotide analogs are linked to a nucleotide distinct from a modified nucleotide of formula (I-A). According to these embodiments, the successive two or more hybridizing nucleotide analogs of formula (I-A) are termed to be contiguous within the antisense strand oligonucleotide.

[0133] In still other embodiments of the said antisense strand oligonucleotide, the hybridizing nucleotide analogs of formula (I-A) are located both as separated single nucleotide analogs of formula (I-A) and as one or more stretches of successive hybridizing nucleotide analogs of formula (I-A). As it is readily understood, the successive hybridizing nucleotide analogs of formula (I-A) which are linked together are contiguous nucleotide analogs of formula (I-A) that are comprised in the said antisense strand oligonucleotide.

[0134] Illustratively, in embodiments of a double-stranded oligonucleotide wherein the antisense strand oligonucleotide has 23 nucleotides in length and wherein all nucleotides are paired with the sense strand oligonucleotide, the said antisense strand oligonucleotide may comprise a hybridizing nucleotide analog of formula (I-A) at nucleotide positions selected from the group consisting of nucleotide positions 1, 2, 3, 4, 5, 6, 7, 8, 9, 10, 11, 12, 13, 14, 15, 16, 17, 18, 19, 20, 21, 22 or 23 the nucleotide position numbering starting from the 5′-end of the antisense strand oligonucleotide.

[0135] Still illustratively, in embodiments of a double-stranded oligonucleotide wherein the antisense strand oligonucleotide has 23 nucleotides in length and which comprises (i) a hybridizing region of 21 nucleotides in length and (ii) a 3′-overhang of two nucleotides in length, the said antisense strand oligonucleotide may comprise a hybridizing nucleotide analog of formula (I-A) at nucleotide positions selected from the group consisting of nucleotide positions 1, 2, 3, 4, 5, 6, 7, 8, 9, 10, 11, 12, 13, 14, 15, 16, 17, 18, 19, 20, or 21, the nucleotide position numbering starting from the 5′-end of the antisense strand oligonucleotide. In some embodiments thereof, the antisense strand oligonucleotide further comprises two overhang nucleotide analogs of formula (I-A) in the 3′-overhang thereof.

[0136] In other illustrative embodiments of a double-stranded oligonucleotide wherein the antisense strand oligonucleotide has 23 nucleotides in length, the said antisense strand oligonucleotide may comprise a hybridizing nucleotide analog of formula (I-A) at nucleotide positions selected from the group consisting of nucleotide positions 2, 3, 4, 5, 6, 7 or 8, the nucleotide position numbering starting from the 5′-end of the antisense strand oligonucleotide.

### Embodiments of the Antisense Strand Comprising Targeted Nucleotides

[0137] In some embodiments of the antisense strand oligonucleotide of a double-stranded oligonucleotide according to the present disclosure, the said antisense strand oligonucleotide further comprises one or more targeted nucleotide analogs.

[0138] In some of these embodiments, at least one of the one or more targeted nucleotide analogs comprised therein consists of a targeted nucleotide analog of formula (I-B) as described elsewhere in the present specification.

[0139] Thus, in some embodiments of the antisense strand oligonucleotide of a double-stranded oligonucleotide according to the present disclosure, the said antisense strand oligonucleotide comprises one or more targeted nucleotide analogs of formula (I-B) as described elsewhere in the present specification.

[0140] Targeted nucleotide analogs of formula (I-B) may be present at various locations within the antisense strand oligonucleotide of a double-stranded oligonucleotide according to the present disclosure.

[0141] In some embodiments, targeted nucleotide analogs of formula (I-B) are located at the 3′-overhang or at the 5′-overhang of the antisense oligonucleotide strand, such as at the 3′-overhang or at the 5′-overhang of the antisense strand oligonucleotide of a siRNA.

[0142] In some preferred embodiments, targeted nucleotide analogs of formula (I-B) are located in an overhang of a dsRNA, such as of a siRNA. For example, the targeted nucleotide analogs of formula (I-B) are located in an overhang, such as the 3′-overhang, of the antisense strand oligonucleotide of a siRNA.

[0143] In some embodiments, 2 to 10 (e.g., 2 to 5) targeted nucleotide analogs of formula (I-B) are present in the antisense stand oligonucleotide of a double-stranded oligonucleotide according to the present disclosure. As used herein, 2 to 10 targeted nucleotide analogs of formula (I-B) encompass 2, 3, 4, 5, 6, 7, 8, 9 and 10 targeted nucleotide analogs of formula (I-B).

### Embodiments of the Sense Strand of a Double-Stranded Oligonucleotide

[0144] In some embodiments, the sense strand oligonucleotide of a double-stranded oligonucleotide according to the present disclosure does not comprise any modified nucleotide of formula (I-A). In some of these embodiments, the sense strand oligonucleotide of a double-stranded oligonucleotide as described herein may comprise one or more modified nucleotides distinct from a nucleotide analog of formula (I-A), such as methoxy- or fluoro-modified nucleotides.

[0145] In other embodiments, the sense strand oligonucleotide of a double-stranded oligonucleotide according to the present disclosure comprises one or more nucleotide analogs. In some embodiments, the sense strand oligonucleotide of a double stranded oligonucleotide according to the present disclosure comprises one or more of the nucleotide analogs of formula (I-A), which nucleotide analogs of formula (I-A) may be located in a 5′-overhang thereof, in a 3′-overhang thereof, in the hybridizing region thereof, or at tow or more of these locations within the sense strand oligonucleotide.

[0146] In particular embodiments of the sense strand oligonucleotide of a double-stranded oligonucleotide as described herein, nucleotide analogs of formula (I-A) are located at the 3′-overhang, at the 5′-overhang, or both at the 3′-overhang and at the 5′-overhang of the said sense strand oligonucleotide. In some of these particular embodiments, nucleotide analogs of formula (I-A) are exclusively located at the 3′-overhang of the sense strand oligonucleotide of a dsRNA, such as exclusively located at the 3′-overhang of a nucleic acid strand of a siRNA.

[0147] In some of these particular embodiments, nucleotide analogs of formula (I-A) are located (i) both at the 3′-overhang and at the 5′-overhang of the sense strand oligonucleotide of a siRNA.

[0148] In some embodiments, 2 to 10 (e.g., 2 to 5) nucleotide analogs of formula (I-A) are present in the sense strand oligonucleotide of a double-stranded oligonucleotide according to the present disclosure. As used herein, 2 to 10 nucleotide analogs of formula (I-A) encompass 2, 3, 4, 5, 6, 7, 8, 9 and 10 nucleotide analogs of formula (I-A), which nucleotide analogs of formula (I-A) may be located in a 5′-overhang thereof, in a 3′-overhang thereof, in the hybridizing region thereof, or at tow or more of these locations within the sense strand oligonucleotide.

### Embodiments of the Sense Strand Comprising Targeted Nucleotides

[0149] In some embodiments of the sense strand oligonucleotide of a double-stranded oligonucleotide according to the present disclosure, the said sense strand oligonucleotide further comprises one or more targeted nucleotide analogs.

[0150] In some of these embodiments, at least one of the one or more targeted nucleotide analogs comprised therein consists of a targeted nucleotide analog of formula (I-B) as described elsewhere in the present specification.

[0151] Thus, in some embodiments of the sense strand oligonucleotide of a double-stranded oligonucleotide according to the present disclosure, the said sense strand oligonucleotide comprises one or more targeted nucleotide analogs of formula (I-B) as described elsewhere in the present specification.

[0152] As illustrated in the examples herein, targeted nucleotide analogs of formula (I-B) may be present at various locations within the sense strand oligonucleotide of a double-stranded oligonucleotide according to the present disclosure.

[0153] In some embodiments, targeted nucleotide analogs of formula (I-B) are located at the 3′-overhang or at the 5′-overhang of the sense oligonucleotide strand, such as at the 3′-overhang or at the 5′-overhang of the sense strand oligonucleotide of an siRNA.

[0154] In some preferred embodiments, targeted nucleotide analogs of formula (I-B) are located in an overhang of a dsRNA, such as of an siRNA. For example, the targeted nucleotide analogs of formula (I-B) are located in an overhang, such as the 5′-overhang, of the sense strand oligonucleotide of an siRNA.

[0155] In some embodiments, 2 to 10 (e.g., 2 to 5) targeted nucleotide analogs of formula (I-B) are present in the sense stand oligonucleotide of a double-stranded oligonucleotide according to the present disclosure. As used herein, 2 to 10 targeted nucleotide analogs of formula (I-B) encompass 2, 3, 4, 5, 6, 7, 8, 9 and 10 targeted nucleotide analogs of formula (I-B).

[0156] In some embodiments, the sense strand oligonucleotide comprises (i) one or more nucleotide analogs of formula (I-A) and (ii) one or more nucleotide analogs of formula (I-B). In some of these embodiments, the one or more nucleotide analogs of formula (I-A) comprised in the sense strand oligonucleotide consist of hybridizing nucleotide analogs of formula (I-A), i.e. consists of nucleotide analogs of formula (I-A) that are not located at the 5′-overhang nor at the 3′-overhang of the sense strand oligonucleotide, in embodiments wherein a 5′-overhang, a 3′-overhang, or both a 5′-overhang and a 3′-overhang is present. In some of these embodiments, the sense strand oligonucleotide also comprises one or more nucleotide analogs of formula (I-A) in the 5′-overhang, in the 3′-overhang, or both in the 5′-overhang and in the 3′-overhang.

[0157] Other Features of Double-Stranded Oligonucleotides

[0158] A double-stranded oligonucleotide comprising one or more nucleotide analogs of formula (I-A) may be termed a “ribonucleic acid” or “RNA”, in consideration of (i) the ribose sugar moiety that is contained in most of the nucleotide monomer units comprised therein and (ii) the kind of nucleobases comprised therein. Thus, certain aspects of the present disclosure relate to double-stranded ribonucleic acid (dsRNA) molecules targeting an mRNA of interest. A dsRNA of the present invention may comprise a modified oligonucleotide comprising one or more compounds of formula (I-A).

[0159] In some embodiments, the dsRNA comprises two strands, a sense strand comprising a first sequence and an antisense strand comprising a second sequence, wherein the first strand and the second strand are sufficiently complementary to form a duplex structure. In some embodiments, the sense strand comprises a first sequence that is substantially complementary or fully complementary to the second sequence in the antisense strand. In some embodiments, the second sequence in the antisense strand is substantially complementary or fully complementary to a target sequence, e.g., a sequence of an mRNA transcribed from a target gene.

[0160] In some embodiments, each of the sense and antisense strands may range from 9-36 nucleotides in length. For example, each strand may be between 12-30 nucleotides in length, 14-30 nucleotides in length, 15-30 nucleotides in length, 25-30 nucleotides in length, 27-30 nucleotides in length, 15-26 nucleotides in length, 15-23 nucleotides in length, 15-22 nucleotides in length, 15-21 nucleotides in length, 15-20 nucleotides in length, 15-19 nucleotides in length, 15-18 nucleotides in length, 15-17 nucleotides in length, 17-30 nucleotides in length, 17-23 nucleotides in length, 17-21 nucleotides in length, 17-19 nucleotides in length, 18-30 nucleotides in length, 18-26 nucleotides in length, 18-25 nucleotides in length, 18-23 nucleotides in length, 18-22 nucleotides in length, 18-21 nucleotides in length, 18-20 nucleotides in length, 19-30 nucleotides in length, 19-25 nucleotides in length, 19-24 nucleotides in length, 19-23 nucleotides in length, 19-22 nucleotides in length, 19-21 nucleotides in length, 19-20 nucleotides in length, 20-30 nucleotides in length, 20-26 nucleotides in length, 20-25 nucleotides in length, 20-24 nucleotides in length, 20-23 nucleotides in length, 20-22 nucleotides in length, 20-21 nucleotides in length, 21-30 nucleotides in length, 21-26 nucleotides in length, 21-25 nucleotides in length, 21-24 nucleotides in length, 21-23 nucleotides in length, or 21-22 nucleotides in length. In some embodiments, each strand is greater than or equal to 9, 10, 11, 12, 13, 14, 15, 16, 17, 18, 19, 20, 21, 22, 23, 24, 25, 26, 27, 28, 29, 30, 31, 32, 33, 34, or 35 nucleotides in length. In some embodiments, each strand is less than or equal to 10, 11, 12, 13, 14, 15, 16, 17, 18, 19, 20, 21, 22, 23, 24, 25, 26, 27, 28, 29, 30, 31, 32, 33, 34, 35, or 36 nucleotides in length. That is, each strand can be any of a range of nucleotide lengths having an upper limit of 10, 11, 12, 13, 14, 15, 16, 17, 18, 19, 20, 21, 22, 23, 24, 25, 26, 27, 28, 29, 30, 31, 32, 33, 34, 35, or 36, and an independently selected lower limit of 9, 10, 11, 12, 13, 14, 15, 16, 17, 18, 19, 20, 21, 22, 23, 24, 25, 26, 27, 28, 29, 30, 31, 32, 33, 34, or 35, wherein the lower limit is less than the upper limit. In some embodiments, each strand is 9, 10, 11, 12, 13, 14, 15, 16, 17, 18, 19, 20, 21, 22, 23, 24, 25, 26, 27, 28, 29, 30, 31, 32, 33, 34, 35, or 36 nucleotides in length. In some embodiments, the sense strand and antisense strand are the same number of nucleotides in length. In some embodiments, the sense strand and antisense strand are a different number of nucleotides in length.

[0161] Overhangs

[0162] In some embodiments, a dsRNA of the present disclosure comprises one or more overhangs at the 3′-end, 5′-end, or both ends of one or both of the sense and antisense strands. In some embodiments, the one or more overhangs improve the stability with a lower number of phosphorothioate-groups in the overhangs.

[0163] In some embodiments, the overhang comprises one or more, two or more, three or more, four or more, five or more, or six or more nucleotides. For example, the overhang may comprise 1-8 nucleotides, 2-8 nucleotides, 3-8 nucleotides, 4-8 nucleotides, 5-8 nucleotides, 1-5 nucleotides, 2-5 nucleotides, 3-5 nucleotides, 4-5 nucleotides, 1-4 nucleotides, 2-4 nucleotides, 3-4 nucleotides, 1-3 nucleotides, 2-3 nucleotides, or 1-2 nucleotides. In some embodiments, the overhang is one, two, three, four, five, or six nucleotides in length.

[0164] In some embodiments, an overhang of the present disclosure comprises one or more ribonucleotides. In some embodiments, an overhang of the present disclosure comprises one or more deoxyribonucleotides. In some embodiments, the overhang comprises one or more thymines. In some embodiments, the dsRNA comprises an overhang located at the 3′-end of the antisense strand. In some embodiments, the dsRNA comprises a blunt end at the 5′-end of the antisense strand. In some embodiments, the dsRNA comprises an overhang located at the 3′-end of the antisense strand and a blunt end at the 5′-end of the antisense strand. In some embodiments, the dsRNA comprises an overhang located at the 3′-end of the sense strand. In some embodiments, the dsRNA comprises a blunt end at the 5′-end of the sense strand. In some embodiments, the dsRNA comprises an overhang located at the 3′-end of the sense strand and a blunt end at the 5′-end of the sense strand. In some embodiments, the dsRNA comprises overhangs located at both of the 3′-ends of the sense and antisense strands of the dsRNA.

[0165] In some embodiments, the dsRNA comprises an overhang located at the 5′-end of the antisense strand. In some embodiments, the dsRNA comprises a blunt end at the 3′-end of the antisense strand. In some embodiments, the dsRNA comprises an overhang located at the 5′-end of the antisense strand and a blunt end at the 3′-end of the antisense strand. In some embodiments, the dsRNA comprises an overhang located at the 5′-end of the sense strand. In some embodiments, the dsRNA comprises a blunt end at the 3′-end of the sense strand. In some embodiments, the dsRNA comprises an overhang located at the 5′-end of the sense strand and a blunt end at the 3′-end of the sense strand. In some embodiments, the dsRNA comprises overhangs located at both strands of the dsRNA.

[0166] In some embodiments, the overhang is the result of the sense strand being longer than the antisense strand. In some embodiments, the overhang is the result of the antisense strand being longer than the sense strand. In some embodiments, the overhang is the result of sense and antisense strands of the same length being staggered. In some embodiments, the overhang forms a mismatch with the target mRNA. In some embodiments, the overhang is complementary to the target mRNA.

[0167] In some embodiments, a dsRNA of the present disclosure comprises a sense strand comprising a first sequence and an antisense strand comprising a second sequence, wherein the first and second sequences are substantially complementary or complementary. In some embodiments, the first and second sequences are substantially complementary or complementary and form a duplex region of a dsRNA. In some embodiments, the duplex region of the dsRNA is 9-36 nucleotide pairs in length. For example, the duplex region may be between 12-30 nucleotide pairs in length, 14-30 nucleotide pairs in length, 15-30 nucleotide pairs in length, 15-26 nucleotide pairs in length, 15-23 nucleotide pairs in length, 15-22 nucleotide pairs in length, 15-21 nucleotide pairs in length, 15-20 nucleotide pairs in length, 15-19 nucleotide pairs in length, 15-18 nucleotide pairs in length, 15-17 nucleotide pairs in length, 17-30 nucleotide pairs in length, 27-30 nucleotide pairs in length, 17-23 nucleotide pairs in length, 17-21 nucleotide pairs in length, 17-19 nucleotide pairs in length, 18-30 nucleotide pairs in length, 18-26 nucleotide pairs in length, 18-25 nucleotide pairs in length, 18-24 nucleotide pairs in length, 18-23 nucleotide pairs in length, 18-22 nucleotide pairs in length, 18-21 nucleotide pairs in length, 18-20 nucleotide pairs in length, 19-30 nucleotide pairs in length, 19-25 nucleotide pairs in length, 19-24 nucleotide pairs in length, 19-23 nucleotide pairs in length, 19-22 nucleotide pairs in length, 19-21 nucleotide pairs in length, 19-20 nucleotide pairs in length, 20-30 nucleotide pairs in length, 20-26 nucleotide pairs in length, 20-25 nucleotide pairs in length, 20-24 nucleotide pairs in length, 20-23 nucleotide pairs in length, 20-22 nucleotide pairs in length, 20-21 nucleotide pairs in length, 21-30 nucleotide pairs in length, 21-26 nucleotide pairs in length, 21-25 nucleotide pairs in length, 21-24 nucleotide pairs in length, 21-23 nucleotide pairs in length, or 21-22 nucleotide pairs in length. In some embodiments, the duplex region of the dsRNA is greater than or equal to 9, 10, 11, 12, 13, 14, 15, 16, 17, 18, 19, 20, 21, 22, 23, 24, 25, 26, 27, 28, 29, 30, 31, 32, 33, 34, or 35 nucleotide pairs in length. In some embodiments, the duplex region of the dsRNA is less than or equal to 10, 11, 12, 13, 14, 15, 16, 17, 18, 19, 20, 21, 22, 23, 24, 25, 26, 27, 28, 29, 30, 31, 32, 33, 34, 35, or 36 nucleotide pairs in length. That is, the duplex region of the dsRNA can be any of a range of nucleotide pairs in length having an upper limit of 10, 11, 12, 13, 14, 15, 16, 17, 18, 19, 20, 21, 22, 23, 24, 25, 26, 27, 28, 29, 30, 31, 32, 33, 34, 35, or 36, and an independently selected lower limit of 9, 10, 11, 12, 13, 14, 15, 16, 17, 18, 19, 20, 21, 22, 23, 24, 25, 26, 27, 28, 29, 30, 31, 32, 33, 34, or 35, wherein the lower limit is less than the upper limit. In some embodiments, the duplex region is 9, 10, 11, 12, 13, 14, 15, 16, 17, 18, 19, 20, 21, 22, 23, 24, 25, 26, 27, 28, 29, 30, 31, 32, 33, 34, 35, or 36 nucleotide pairs in length. If more than one dsRNA is used, the duplex region of each dsRNA may be the same or different lengths than the one or more additional dsRNAs.

### Embodiments of Targeted Double-Stranded Oligonucleotides

[0168] As described previously in the present disclosure, in a double-stranded oligonucleotide, the antisense strand oligonucleotide, the sense strand oligonucleotide or both the antisense strand oligonucleotide and the sense strand oligonucleotide may comprise one or more targeted nucleotides. In some embodiments, the antisense strand oligonucleotide, the sense strand oligonucleotide or both the antisense strand oligonucleotide and the sense strand oligonucleotide may comprise one or more targeted nucleotide analog of formula (I-B).

[0169] Thus, in some embodiments, targeted double-stranded oligonucleotides according to the present disclosure comprise one or more targeted nucleotide analogs of formula (I-B).

[0170] In some other embodiments, a targeted nucleotide comprised in a targeted double-stranded oligonucleotide according to the present disclosure is selected among the targeted nucleotides that are known in the art.

[0171] Thus, in some embodiments, targeted double-stranded oligonucleotides according to the present disclosure comprise one or more non-targeted nucleotide analogs of formula (I-A) and one or more targeted nucleotides having a structure different from formula (I-B).

[0172] According to some of these embodiments, a targeted double-stranded oligonucleotide may comprise (i) a sense strand oligonucleotide comprising one or more targeted nucleotides, which encompasses one or more targeted nucleotide analogs of formula (I-B) and (ii) a non-targeted antisense strand oligonucleotide, i.e. an antisense strand oligonucleotide that does not comprise a targeted nucleotide. According to some other of these embodiments, a targeted double-stranded oligonucleotide may comprise (i) a non-targeted sense strand oligonucleotide that does not comprise a targeted nucleotide and (ii) a targeted antisense strand oligonucleotide, comprising one or more targeted nucleotides, which encompasses one or more targeted nucleotide analogs of formula (I-B). According to still other embodiments, a targeted double-stranded oligonucleotide may comprise (i) a sense strand oligonucleotide comprising one or more targeted nucleotides, which encompasses one or more targeted nucleotide analogs of formula (I-B) and a targeted antisense strand oligonucleotide, comprising one or more targeted nucleotides, which encompasses one or more targeted nucleotide analogs of formula (I-B).

[0173] In some embodiments, a targeted double-stranded oligonucleotide according to the present disclosure comprises:
[0174] a sense strand oligonucleotide comprising (i) one or more nucleotide analogs of formula (I-A) and (ii) one or more nucleotide analogs of formula (I-B), and
[0175] an antisense strand oligonucleotide comprising one or more hybridizing nucleotide analogs of formula (I-A), i.e. one or more nucleotide analogs of formula (I-A) which are not located at the 5′-overhang nor at the 3′-overhang, when one or both overhangs are present in the said antisense strand oligonucleotide. In some embodiments, the said antisense strand oligonucleotide further comprises one or more nucleotide analogs of formula (I-A) at the 5′-overhang or the 3′-overhang thereof, in embodiments wherein one or both these overhangs are present.

[0176] As disclosed elsewhere in the present disclosure, a targeted nucleotide analog of formula (I-B) has group R3 as a cell targeting moiety. Cell targeting moieties are disclosed elsewhere in the present disclosure.

[0177] In particular embodiments, the said one or more targeted nucleotide analogs of formula (I-B) are linked, one to the other so as to form a continuous chain of these targeted nucleotide analogs at the selected end of the oligonucleotide strand, i.e. the said one or more nucleotide analogs of formula (I-B) are contiguous in the selected antisense strand oligonucleotide or in the selected sense strand oligonucleotide.

### Further Embodiments of Double-Stranded Oligonucleotides

[0178] For the purpose of illustration, and without limiting the present disclosure, double-stranded oligonucleotides may also comprise one or more further nucleotides on the sense and/or the antisense strands that are modified.

[0179] The modification may be selected from substitutions or insertions with analogues of nucleic acids or bases and chemical modification of the base, sugar or phosphate moieties. The selected modifications may each and individually be selected among 3′-terminal deoxy-thymine, 2′-O-methyl, a 2′-deoxy modification, a 2′-desoxy-fluoro, a 2′-amino modification, a 2′-alkyl modification, a phosphorothioate modification, a phosphoramidate modification, a 5′-phosphorothioate group modification, a 5′-phosphate or 5′-phosphate mimic modification and a cholesteryl derivative or a dodecanoic acid bisdecylamide group modification and/or the modified nucleotide may be any one of a locked nucleotide, an abasic nucleotide or a non-natural base comprising nucleotide. One of the preferred embodiments may be at least one modification being 2′-O-methyl and/or at least one modification being 2′-desoxy-fluoro.

[0180] Other examples of modified oligonucleotides, as used herein, can include one or more of the following: modification, e.g., replacement of one or both of the non-linking phosphate oxygens and/or of one or more of the linking phosphate oxygens; replacement of the phosphate moiety; modification or replacement of a naturally occurring base; replacement or modification of the ribose-phosphate backbone; modification of the 3′-end or 5′-end of the RNA, e.g., removal, modification or replacement of a terminal phosphate group or conjugation of a moiety, e.g., a fluorescently labeled moiety, to either the 3′- or 5′-end of RNA.

### Further Embodiments of Targeted Oligonucleotides—Cell Targeting Moiety

[0181] A targeted nucleotide herein may be linked to one or more ligands targeting specific cells or tissue. Such a ligand is also called “cell targeting moiety.” The ligand encompasses any molecular group that increases efficiency of the delivery of the resulting oligonucleotide such as an siRNA into cells, e.g., by improving specific cell targeting, improving the oligonucleotide's cell internalization, and/or improving intracellular mRNA targeting. The ligand may be selected from a group comprising receptor specific peptide, receptor-specific protein (e.g., monoclonal antibodies or fusion proteins), and receptor-specific small molecule ligands (e.g., carbohydrates such as GalNAc groups).

[0182] Ligands may be naturally occurring, or recombinant or synthetic. For example, the ligand may be a protein, a carbohydrate, a lipopolysaccharide, a lipid, a synthetic polymer, a polyamine, an alpha helical peptide, a lectin, a vitamin, or a cofactor. In some embodiments, the ligand is one or more dyes, crosslinkers, polycyclic aromatic hydrocarbons, peptide conjugates (e.g., RGD peptides, antennapedia peptide, Tat peptide), polyethylene glycol (PEG), enzymes, haptens, transport/absorption facilitators, synthetic ribonucleases (e.g., imidazole, bisimidazole, histamine, or imidazole clusters), human serum albumin (HSA), or LDL.

[0183] By way of example, the ligand may be one or more proteins, glycoproteins, peptides, or molecules having a specific affinity for a co-ligand. Such ligands may include a thyrotropin, melanotropin, glycoprotein, surfactant protein A, mucin carbohydrate, lactose (e.g., multivalent lactose), galactose (e.g., multivalent galactose), N-acetyl-galactosamine (e.g., multivalent N-acetyl-galactosamine), N-acetyl-glucosamine (e.g., multivalent N-acetyl-glucosamine), mannose (e.g., multivalent mannose), fucose (e.g., multivalent fucose), glycosylated polyaminoacids, transferrin, bisphosphonate, polyglutamate, polyaspartate, a lipid, cholesterol, a steroid, bile acid, folate, vitamin B12, and biotin.

[0184] In some embodiments, the cell targeting moiety is one or more dyes, crosslinkers, polycyclic aromatic hydrocarbons, peptide conjugates (e.g., antennapedia peptide, Tat peptide), polyethylene glycol (PEG), enzymes, haptens, transport/absorption facilitators, synthetic ribonucleases (e.g., imidazole, bisimidazole, histamine, or imidazole clusters), human serum albumin (HSA), or LDL.

[0185] In some embodiments, the ligand may be one or more cholesterol derivatives or lipophilic moieties. Any lipophilic compound may include, without limitation, cholesterol or a cholesterol derivative; cholic acid; a vitamin (such as folate, vitamin A, vitamin E (tocopherol), biotin, pyridoxal; bile or fatty acid conjugates, including both saturated and non-saturated (such as lauroyl (C12), myristoyl (C14) and palmitoyl (C16), stearoyl (C18) and docosanyl (C22), lithocholic acid and/or lithocholic acid oleylamine conjugate (lithocholic-oleyl, C43); polymeric backbones or scaffolds (such as PEG, triethylene glycol (TEG), hexaethylene glycol (HEG), poly(lactic-co-glycolic acid) (PLGA), poly(lactide-co-glycolide) (PLG), hydrodynamic polymers; steroids (such as dihydrotestosterone); terpene (such as triterpene); cationic lipids or peptides; and/or a lipid or lipid-based molecule. Such a lipid or lipid-based molecule may bind a serum protein, e.g., human serum albumin (HSA). A lipid based ligand may be used to modulate (e.g., control) the binding of the conjugate to a target tissue. For example, a lipid or lipid-based ligand that binds to HSA more strongly will be less likely to be targeted to the kidney and therefore less likely to be cleared from the body. The target tissue may be the liver, including parenchymal cells of the liver.

[0186] The polyaminoacids, transferrin, cell targeting ligands or moieties may also be antibodies that bind to receptors on specific cell types such as hepatocytes. Exemplary cell receptor-specific monoclonal antibodies are those disclosed by Xia et al. (2009, Mol Pharm, 63(3):747-751); Cuellar et al. (2015, Nucleic Acids Research, 43(2):1189-1203); Balmer et al. (2016, Nat Protocol, 11(1):22-36); Ibtejah et al. (2017, Clin Immunol, 176:122-130); and Sugo et al. (2016, J Control Release, 237:1-13).

[0187] The cell targeting ligands or moieties also encompass monovalent or multivalent (e.g., trivalent) GalNAc groups, such as those disclosed by Prakash et al. (2015, Bioorg Med Chem Lett, 25(19):4127-4130); Zu et al. (2016, Mol Ther—Nucleic Acids, e317, doi: 10.1038/mnta.2016.26); Zimmermann et al. (2017, Mol Ther, 25(1):71-78); Shemesh et al.

[0188] (2016, Mol Ther Nucleic Acids, 5:e319—doi:10.1038/mnta.2016.31); Huang et al. (2016, Mol Ther—Nucleic Acids, 6:116-132); Rozema et al. (2007, Proc Natl Acad Sci USA, 104(32):12982-12987); Rajeev et al. (2015, Chembiochem, 16(6):903-908); and Nair et al. (2014, J Am Chem Soc, 136(49):16958-16961).

[0189] Preparation of Modified dsRNAs

[0190] dsRNAs of the present disclosure may be chemically/physically linked to one or more ligands, moieties or conjugates. In some embodiments, the dsRNA is conjugated/attached to one or more ligands via a linker. Any linker known in the art may be used, including, for example, multivalent branched linkers. Conjugating a ligand to a dsRNA may alter its distribution, enhance its cellular absorption and/or targeting to a particular tissue and/or uptake by one or more specific cell types (e.g., liver cells), and/or enhance the lifetime of the dsRNA agent. In some embodiments, a hydrophobic ligand is conjugated to the dsRNA to facilitate direct permeation across the cellular membrane and/or uptake by the cells (e.g., liver cells).

[0191] In some embodiments of a dsRNA conjugate, one or more nucleotides may comprise a targeting moiety-bearing group, such as one or more nucleotides comprise a targeting moiety-bearing group wherein a targeting moiety is covalently linked to the nucleotide backbone, possibly via a linking group. According to these embodiments, one or more nucleotides of a dsRNA are conjugated to a targeting moiety-bearing group comprising a targeting moiety and wherein the targeting moiety may be, a ligand (e.g., a cell penetrating moiety or agent) that enhances intracellular delivery of the compositions.

[0192] Ligand-conjugated dsRNAs and ligand-molecule bearing sequence-specific linked nucleosides and nucleotides of the present disclosure may be assembled by any method known in the art, including, for example, by assembly on a suitable DNA synthesizer utilizing standard nucleotide precursors, or nucleotide or nucleoside conjugate precursors that already bear the linking moiety, ligand-nucleotide, or nucleoside-conjugated precursors that already bear the ligand molecule, or non-nucleoside ligand-bearing building blocks.

[0193] Ligand-conjugated dsRNAs of the present disclosure may be synthesized by any method known in the art, including, for example, by the use of a dsRNA bearing a pendant reactive functionality such as that derived from the attachment of a linking molecule onto the dsRNA. In some embodiments, this reactive oligonucleotide may be reacted directly with commercially-available ligands, ligands that are synthesized bearing any of a variety of protecting groups, or ligands that have a linking moiety attached thereto. In some embodiments, the methods facilitate the synthesis of ligand-conjugated dsRNA by the use of nucleoside monomers that have been appropriately conjugated with ligands and that may further be attached to a solid support material. In some embodiments, a dsRNA bearing an aralkyl ligand attached to the 3′-end of the dsRNA is prepared by first covalently attaching a monomer building block to a controlled-pore-glass support via an aminoalkyl group; then, nucleotides are bonded via standard solid-phase synthesis techniques to the monomer building-block bound to the solid support. The monomer building-block may be a nucleoside or other organic compound that is compatible with solid-phase synthesis.

[0194] Precursors of the Nucleotide Analogs of Formula (I-A) and (I-B)

[0195] The nucleotide analogs of formula (I-A) and (I-B) may be synthesized by starting from precursor compounds, which may be termed nucleotide analog precursors herein.

[0196] Both nucleotide analogs of formula (I-A) and (I-B) may be synthesized from their corresponding precursor compounds of formula (II) below.

[0197] As it will be readily understood, nucleotide analogs of formula (I-A) may be prepared by starting from a nucleotide analog precursor of formula (II-A) below, wherein group R3 does not consist of a cell targeting moiety. Further, nucleotide analogs of formula (I-B) may be prepared by starting from a nucleotide analog precursor of formula (II-B) below, wherein group R3 consists of a cell targeting moiety.

[0198] The present disclosure also describes nucleotide analog precursors of general formula (II)

[chemical structure]

[0199] Wherein:
[0200] B is a heterocyclic nucleobase;
[0201] P1 and P2 are each, independently, H, a reactive phosphorus group or a protecting group;
[0202] Y is O, NH, NR1 or N—C(═O)-R1, wherein R1 is:
   [0203] a (C₁-C₂₀) alkyl group, optionally non-substituted or substituted by one or more groups selected from an halogen atom, a (C1-C6) alkyl group, a (C3-C8) cycloalkyl group, a (C3-C14) heterocycle, a (C6-C14) aryl group, a (C5-C14) heteroaryl group, —O-Z1, —N(Z1)(Z2), —S-Z1, —CN, —C(=J)-O-Z1, —O—C(=J)-Z1, —C(=J)-N(Z1)(Z2), and —N(Z1)-C(=J)-Z2, wherein
   [0204] J is O or S,
   [0205] each of Z1 and Z2 is, independently, H, a (C1-C6) alkyl group, optionally substituted by one or more groups selected from a halogen atom and a (C1-C6) alkyl group,
   [0206] a (C3-C8) cycloalkyl group, optionally substituted by one or more groups selected from a halogen atom and a (C1-C6) alkyl group, or
   [0207] a group —[C(═O)]m-R2-(O—CH₂—CH₂)p-R3, wherein
   [0208] m is an integer meaning 0 or 1,
   [0209] p is an integer ranging from 0 to 10,
   [0210] R2 is a (C1-C20) alkylene group optionally substituted by a (C1-C6) alkyl group, —O-Z3, —N(Z3)(Z4), —S-Z3, —CN, —C(═K)—O-Z3, —O—C(═K)-Z3, —C(═K)—N(Z3)(Z4), —N(Z3)-C(═K)-Z4, wherein
   [0211] K is O or S,
   [0212] each of Z3 and Z4 is, independently, H, a (C1-C6) alkyl group, optionally substituted by one or more groups selected from a halogen atom and a (C1-C6) alkyl group,
   [0213] and
   [0214] R3 is selected from the group consisting of a hydrogen atom, a (C1-C6) alkyl group, a (C1-C6) alkoxy group, a (C3-C8) cycloalkyl group, a (C3-C14) heterocycle, a (C6-C14) aryl group or a (C5-C14) heteroaryl group,
   [0215] or
   [0216] R3 is a cell targeting moiety,
[0217] X1 and X2 are each, independently, a hydrogen atom, a —(C1-C6) alkyl group, and
[0218] each of Ra, Rb, Rc and Rd is, independently, H or a (C1-C6) alkyl group.

[0219] A compound of formula (II) is encompassed by the term “nucleotide precursor” for the purpose of the present disclosure. A compound of formula (II) wherein group R3 is present and denotes a cell targeting moiety is encompassed by the term “targeted nucleotide precursor” for the purpose of the present disclosure.

[0220] Compounds of formula (I), such as (I-A) ,and (I-B), and (II) disclosed herein encompass isomers, such as stereoisomers thereof, which include the (2S,6R) stereoisomer thereof and the (2R,6R) stereoisomer thereof, as specifically described in the following formula, that specifies position numbering and chiral centers of the compounds of formula (I) and (II) and which is illustrated for compounds of formula (I) and (II) hereunder:

[chemical structure]

[0221] As it will be shown in the examples herein, when incorporated in an oligonucleotide, the (2S,6R) stereoisomer of a compound of formula (I) and the (2R,6R) stereoisomer of a compound of formula (I) are endowed with the ability to generate an siRNA allowing a good inhibition of a target mRNA.

[0222] However, in some embodiments of double-stranded oligonucleotides of the present disclosure, such as siRNAs, stereoisomers of the nucleotide analogs of formula (I-A) having the configuration (2R,6R) are preferred.

[0223] As shown in some examples herein, the use, in double-stranded oligonucleotides, of nucleotide analogs of formula (I-A) consisting of the (2R,6R) stereoisomers thereof, allow a better in vivo potency of the said double-stranded oligonucleotides, e.g. a siRNA, as compared to the corresponding (2S,6R) stereoisomers, when nucleotide analogs (I-A) are incorporated as hybridizing nucleotide analogs as specified herein, e.g. are incorporated in the hybridizing region of the antisense strand oligonucleotide of a siRNA, and in some embodiments are incorporated in the hybridizing region of the sense strand oligonucleotide of a siRNA.

[0224] In some embodiments of a compound of formula (II), which may be termed “dioxane analog” herein, Y is O. An embodiment of such a nucleotide precursor in the present disclosure is termed pre-lB1, wherein B is as defined in formula (II), e.g. pre-lT1, when B consists of a thymidinyl group.

[0225] In other embodiments of a compound of formula (II), which may be termed “morpholino analog” herein, Y is NH, NR1 or N—C(═O)R1.

[0226] In morpholino analogs of formula (II), the nitrogen atom is preferably functionalized, so as to improve properties of the resulting morpholino analog-containing oligonucleotide, and especially the resulting morpholino analog-containing siRNA.

[0227] In some embodiments of a compound of formula (II), the compounds are morpholino analogs of the present disclosure that do not comprise a cell targeting moiety. According to these embodiments, group R3, when present, does not represent a cell targeting moiety.

[0228] Thus, in some preferred embodiments of a morpholino analog of formula (II), Y is NH, NR1 or N—C(═O)-R1, with R1 being as defined for the general formula (II).

[0229] In some embodiments wherein Y is NR1, R1 is:
[0230] a (C1-C20) alkyl group optionally substituted by one or more groups selected from an halogen atom, a (C1-C6) alkyl group, a (C3-C8) cycloalkyl group, a (C3-C14) heterocycle, a (C6-C14) aryl group, a (C5-C14) heteroaryl group, —O-Z1, —N(Z1)(Z2), —S-Z1, —CN, —C(=J)-O-Z1, —O—C(=J)-Z1, —C(=J)-N(Z1)(Z2), and —N(Z1)-C(=J)-Z2, wherein
   [0231] J is O or S, and
   [0232] each of Z1 and Z2 is, independently, H, a (C1-C6) alkyl group, optionally substituted by one or more groups selected from a halogen atom and a (C1-C6) alkyl group, or
[0233] a (C3-C8) cycloalkyl group optionally substituted by one or more groups selected from a halogen atom and a (C1-C6) alkyl group,
[0234] a group —[C(═O)]m-R2-(O—CH₂—CH₂)p-R3, wherein

[0235] m is an integer meaning 0 or 1

[0236] p is an integer ranging from 0 to 10

[0237] R2 is a (C1-C20) alkylene group optionally substituted by a (C1-C6) alkyl group, —O-Z3, —N(Z3)(Z4), —S-Z3, 13 CN, —C(═K)—O-Z3, —O—C(═K)-Z3, —C(═K)—N(Z3)(Z4), —N(Z3)-C(═K)-Z4, wherein

[0238] K is O or S,

[0239] each of Z3 and Z4 is, independently, H, a (C1-C6) alkyl group, optionally substituted by one or more groups selected from a halogen atom and a (C1-C6) alkyl group,
[0240] and

[0241] R3 is selected from the group consisting of a hydrogen atom, a (C1-C6)-alkyl, a (C1-C6)-alkoxy, a (C3-C8) cycloalkyl group, a (C3-C14) heterocycle, a (C6-C14) aryl group or a (C5-C14) heteroaryl group,

[0242] X1 and X2 are each, independently, a hydrogen atom, a (C1-C6) alkyl group

[0243] each of Ra, Rb, Rc and Rd is, independently, H or a (C1-C6) alkyl group.

[0244] As intended herein, a (C1-C20) alkyl group, which may be either a non-substituted alkyl group or a substituted alkyl group, includes C1, C2, C3, C4, C5, C6, C7, C8, C9, C10, C11, C12, C13, C14, C15, C16, C17, C18, C19 and C20 alkyl groups.

[0245] As intended herein, a (C1-C6) alkyl group, which may be either a non-substituted alkyl group or a substituted alkyl group, includes C1, C2, C3, C4, C5 and C6 alkyl groups.

[0246] As intended herein, a (C3-C8) cycloalkyl group, which may be either a non-substituted cycloalkyl group or a substituted cycloalkyl group, includes C3, C4, C5, C6, C7 and C8 cycloalkyl groups.

[0247] As intended herein, a (C3-C14) heterocycle, which may be either a non-substituted or a substituted heterocycle, includes C3, C4, C5, C6, C7, C8, C9, C10, C11, C12, C13 and C14 heterocycles.

[0248] As intended herein, a (C6-C14) aryl group, which may be either a non-substituted aryl group or a substituted aryl group, includes C6, C7, C8, C9, C10, C11, C12, C13 and C14 aryl groups.

[0249] As intended herein, a (C5-C14) heteroaryl group, which may be either a non-substituted heteroaryl group or a substituted heteroaryl group, includes C5, C6, C7, C8, C9, C10, C11, C12, C13 and C14 heteroaryl groups.

[0250] In some embodiments of a compound of formula (II) wherein Y is NR1, R1 is an optionally substituted (C1-C20) alkyl group, and P1, P2, Ra, Rb, Rc, Rd, X1, X2 and B are as defined for the general formula (II).

[0251] In some of these embodiments wherein Y is NR1, R1 is a non-substituted (C1-C20) alkyl group.

[0252] In some of the embodiments wherein Y is NR1, R1 is a non-substituted (C1-C16) alkyl group, which includes an alkyl group selected from a group comprising methyl, isopropyl, butyl, octyl, hexadecyl and P1, P2, Ra, Rb, Rc, Rd, X1, X2 and B have the same meaning as defined for the general formula (II).

[0253] In some embodiments wherein Y is NR1, R1 is a methyl group, Ra, Rb, Rc, Rd, X1 and X2 are a hydrogen atom, and P1 and P2 are as defined for the general formula (II). An embodiment of such a nucleotide precursor in the present disclosure is termed pre-lB2, with B having the same meaning than in general formula (II); for example, an embodiment of such a nucleotide precursor in the present disclosure is termed pre-lT2 when B consists of a thymidinyl group.

[0254] In some embodiments wherein Y is NR1, R1 is an isopropyl group, Ra, Rb, Rc, Rd, X1 and X2 are a hydrogen atom, and P1 and P2 are as defined for the general formula (II). An embodiment of such a nucleotide precursor in the present disclosure is termed pre-lB3, with B having the same meaning than in general formula (II); for example, an embodiment of such a nucleotide precursor in the present disclosure is termed pre-lT3, wherein B consists of a thymidinyl group, pre-lU3, wherein B consists of a uracil group, pre-lG3 when B consists of a guanyl group, pre-lC3, wherein B consists of a cytosyl group, and pre-lA3, wherein B consists of a adenyl group.

[0255] In some embodiments wherein Y is NR1, R1 is a butyl group, Ra, Rb, Rc, Rd, X1 and X2 are a hydrogen atom, and P1 and P2 are as defined for the general formula (II). An embodiment of such a nucleotide precursor in the present disclosure is termed pre-lB6, with B having the same meaning than in general formula (II); for example, an embodiment of such a nucleotide precursor in the present disclosure is termed pre-lT6, wherein B consists of a thymidinyl group.

[0256] In some embodiments wherein Y is NR1, R1 is an octyl group, Ra, Rb, Rc, Rd, X1 and X2 are a hydrogen atom, and P1 and P2 are as defined for the general formula (II). An embodiment of such a nucleotide precursor in the present disclosure is termed pre-lB7, with B having the same meaning than in general formula (II); for example, an embodiment of such a nucleotide precursor in the present disclosure is termed pre-lT7, wherein B consists of a thymidinyl group.

[0257] In some embodiments wherein Y is NR1, R1 is a linear C16-alkyl group, Ra, Rb, Rc, Rd, X1 and X2 are a hydrogen atom, and P1 and P2 are as defined for the general formula (II). An embodiment of such a nucleotide precursor in the present disclosure is termed pre-lB8, with B having the same meaning than in general formula (II); for example, an embodiment of such a nucleotide precursor in the present disclosure is termed pre-lT8, wherein B consists of a thymidinyl group.

[0258] In further embodiments of a compound of formula (II) wherein Y is NR1, R1 is a (C1-C20) alkyl group which is substituted as defined in the general formula (II), which includes a C1, C2 or C3 alkyl group which is substituted as defined in the general formula (II).

[0259] In some of these further embodiments, R1 is an (C1-C20) alkyl group which is substituted by one or more groups selected from an halogen atom, a (C1-C6) alkyl group, a (C3-C8) cycloalkyl group, a (C3-C14) heterocycle, a (C6-C14) aryl group and a (C5-C14) heteroaryl group and P1, P2, Ra, Rb, Rc, Rd, X1, X2 and B have the same meaning as defined for the general formula (II).

[0260] In some of these further embodiments, R1 is an (C1-C20) alkyl group which is substituted by a (C6-C14) aryl group, and P1, P2, Ra, Rb, Rc, Rd, X1, X2 and B have the same meaning as defined for the general formula (II).

[0261] In some embodiments of a compound of formula (II) wherein Y is NR1, R1 is a (C1-C20) alkyl group which is substituted by a (C6-C14) aryl group. These embodiments encompass a compound of formula (II) wherein Y is NR1, R1 is a methylene group which is substituted by an aryl group. These embodiments also encompass a compound of formula (II) wherein Y is NR1, R1 is a (C1-C20) alkyl group which is substituted by a phenyl group.

[0262] In some embodiments of a compound of formula (II) wherein Y is NR1, R1 is a methyl group which is substituted by a non-substituted phenyl group, Ra, Rb, Rc, Rd, X1 and X2 are each a hydrogen atom, and P1 and P2 are as defined in the general formula (II). An embodiment of such a nucleotide precursor in the present disclosure is termed pre-lB5, with B having the same meaning than in general formula (II); for example, an embodiment of such a nucleotide precursor in the present disclosure is termed pre-lT5, wherein B consists of a thymidinyl group.

[0263] In further embodiments of a compound formula (II) wherein Y is NR1, R1 is a (C3-C8) cycloalkyl group, optionally substituted by one or more groups selected from a halogen atom and a (C1-C6) alkyl group, and P1, P2, Ra, Rb, Rc, Rd, X1, X2 and B have the same meaning as defined for the general formula (II).

[0264] In some of these further embodiments of a compound of formula (II) wherein Y is NR1, R1 is a cyclohexyl.

[0265] In some of these further embodiments, of a compound of formula (II) wherein Y is NR1, R1 is a non-substituted cyclohexyl, Ra, Rb, Rc, Rd, X1, X2 are each a hydrogen atom, and P1 and P2 are as defined for the general formula (II).

[0266] An embodiment of such a nucleotide precursor in the present disclosure is termed pre-lB4, with B having the same meaning than in general formula (II); for example, an embodiment of such a nucleotide precursor in the present disclosure is termed pre-lT4, wherein B consists of a thymidinyl group.

[0267] In some other embodiments of a morpholino analog of formula (II), Y is N—C(═O)-R1, wherein R1 is a (C1-C20) alkyl group, wherein optionally substituted by one or more groups selected from an halogen atom, a (C1-C6) alkyl group, a (C3-C8) cycloalkyl group, a (C3-C14) heterocycle, a (C6-C14) aryl group, a (C5-C14) heteroaryl group —O-Z1, —N(Z1)(Z2), —S-Z1, —CN, —C(=J)-O-Z1, —O—C(=J)-Z1, —C(=J)-N(Z1)(Z2), —N(Z1)-C(=J)-Z2, wherein
[0268] J is O or S,
[0269] each of Z1 and Z2 is, independently, H, a (C1-C6) alkyl group, optionally substituted by one or more groups selected from a halogen atom and a (C1-C6) alkyl group, and

[0270] R1 is (C3-C8) cycloalkyl group, optionally substituted by one or more groups selected from an halogen atom or a (C1-C6) alkyl group, and

[0271] P1, P2 Ra, Rb, Rc, Rd, X1, X2 and B have the same meaning as defined for the general formula (II).

[0272] In some of the embodiments wherein Y is N—C(═O)-R1, R1 is an optionally-substituted (C1-C20) alkyl group, which includes an optionally substituted (C 1-C 15) alkyl group, and P1, P2 Ra, Rb, Rc, Rd, X1, X2 and B have the same meaning as defined for the general formula (II).

[0273] According to some of these embodiments wherein Y is N—C(═O)-R1, R1 is selected from a group comprising methyl and pentadecyl groups, and P1, P2 Ra, Rb, Rc, Rd, X1, X2 and B have the same meaning as defined for the general formula (II).

[0274] These embodiments encompass compounds of formula (II) wherein Y is N—C(═O)-R1, R1 is methyl group , Ra, Rb, Rc, Rd, X1, X2 each represent a hydrogen atom and B, P1 and P2 are as defined in the general formula (II).

[0275] An embodiment of such a nucleotide precursor in the present disclosure is termed pre-lB9 with B having the same meaning than in general formula (II); for example, an embodiment of such a nucleotide analog in the present disclosure is termed pre-lT9, wherein B consists of a thymidinyl group. These embodiments also encompass compounds of formula (II) wherein Y is N—C(═O)-R1, R1 is a pentadecyl group, Ra, Rb, Rc, Rd, X1, X2 each represent a hydrogen atom and B, P1 and P2 are as defined in the general formula (II). An embodiment of such a nucleotide precursor in the present disclosure is termed pre-lB10 with B having the same meaning than in general formula (II); for example, an embodiment of such a nucleotide precursor in the present disclosure is termed pre-lT10, wherein B consists of a thymidinyl group.

[0276] In a compound of formula (II), B is a heterocyclic nucleobase moiety. As used herein, the term “heterocyclic nucleobase” refers to an optionally substituted nitrogen-containing heterocycle that is covalently linked to the dioxane ring or the morpholino ring. In some embodiments, the heterocyclic nucleobase can be selected from an optionally substituted purine-base and an optionally substituted pyrimidine-base. The term “purine-base” is used herein in its ordinary sense as understood by those skilled in the art and includes its tautomers. Similarly, the term “pyrimidine-base” is used herein in its ordinary sense as understood by those skilled in the art, and includes its tautomers. A non-limiting list of optionally substituted purine-bases includes purine, adenine, guanine, hypoxanthine, xanthine, alloxanthine, 7-alkylguanine (e.g. 7-methylguanine), theobromine, caffeine, uric acid and isoguanine. Examples of pyrimidine-bases include, but are not limited to, cytosine, thymine, uracil, 5,6-dihydrouracil and 5-alkylcytosine (e.g., 5-methylcytosine). Other non-limiting examples of heterocyclic bases include diaminopurine, 8-oxo-N⁶alkyladenine (e.g., 8-oxo-N⁶methyladenine), 7-deazaxanthine, 7-deazaguanine, 7-deazaadenine, N⁴N⁴ethanocytosin, N^{<6>},N^{<6>}-ethano-2,6-diaminopurine, 5-halouracil (e.g., 5-fluorouracil and 5-bromouracil), pseudoisocytosine, isocytosine, isoguanine, 1,2,4-triazole-3-carboxamides and other heterocyclic bases described in the U.S. Pat. Nos. 5,432,272 and 7,125,855, which are incorporated herein by reference for the limited purpose of disclosing additional heterocyclic bases. In some embodiments, a heterocyclic base can be optionally substituted with an amine or an enol protecting group(s). In some embodiments, B is selected from a group comprising a pyrimidine, a substituted pyrimidine, a purine and a substituted purine, which amino group thereof, when present, is optionally protected by a protecting group.

[0277] In preferred embodiments, B is selected from a group comprising Adenine, Thymine, Uracil, Guanine and Cytosine (i.e. Adenyl, Thyminyl, Uracyl, Guanyl and Cytosyl groups). Adenine, Guanine and Cytosine are optionally protected by amine protecting groups. Amine protecting groups encompass acyl-groups, as e.g. benzoyl, phenylacetyl and isobutyryl-protecting groups or formamidine protecting groups, as e.g. N,N-dimethyl-formamidine.

[0278] As already mentioned, in a compound of formula (II), groups P1 and P2 are each, independently, a hydrogen atom, a reactive phosphorus group or a protecting group.

[0279] As used herein, a “reactive phosphorus group” refers to a phosphorus-containing group comprised in a nucleotide unit or in a nucleotide analog unit and which may react with a hydroxyl group or an amine group comprised in another molecule, and especially in another nucleotide unit or in another nucleotide analog, through a nucleophilic attack reaction. Generally, such a reaction generates an ester-type internucleoside linkage linking the said first nucleotide unit or the said first nucleotide analog unit to the said second nucleotide unit or to the said second nucleotide analog unit.

[0280] In some embodiments, a reactive phosphorus group can be selected from the group consisting of phosphoramidite, H-phosphonate, alkyl-phosphonate, phosphate or phosphate mimics include but not limited to: natural phosphate, phosphorothioate, phosphorodithioate, borano phosphate, borano thiophosphate, phosphonate, halogen substituted phosphonates and phosphates, phosphoramidates, phosphodiester, phosphotriester, thiophosphodiester, thiophosphotriester, diphosphates and triphosphates. Protecting groups encompass hydroxyl-, amine- and phosphoramidite protecting groups, which may be selected from a group comprising acetyl (Ac), benzoyl (Bzl), benzyl (Bn), isobutyryl (iBu), phenylacetyl, benzyloxymethyl acetal (BOM), beta-methoxyethoxymethyl ether (MEM), methoxymethylether (MOM), p-methoxybenzyl ether (PMB), methylthiomethyl ether, pivaloyl (Piv), tetrahydropyranyl (THP), triphenylmethyl (Trt), methoxytrityl [(4-methoxyohenyl)diphenylmethyl] (MMT), dimethoxytrityl, [bis-(4-methoxyphenyl)phenylmethyl (DMT), trimethylsilyl ether (TMS), tert-butyldimethylsilyl ether (TBDMS), tri-iso-propylsilyloxymethyl ether (TOM), tri-isopropylsilyl ether (TIPS), methyl ethers, ethoxyethyl ethers (EE) N,N-dimethylformamidine and 2-cynaonethyl (CE).

[0281] In some embodiments of a compound of formula (II) wherein Y, B, Ra, Rb, Rc, Rd, X1 and X2 are as defined for the general formula (II), one of P1 or P2 is a O-4,4′-dimethoxytrityl group (DMT) and the other of P1 and P2 is H, a reactive phosphorus group or a protecting group.

[0282] In some embodiments of a compound of formula (II) wherein Y, B, Ra, Rb, Rc, Rd, X1 and X2 are as defined for the general formula (II), one of P1 and P2 is a 2-cyanoethyl-N,N-diisopropylphosphoramidite group and the other P1 and P2 is a protecting group.

[0283] In some embodiments of a compound of formula (II) wherein Y, B, Ra, Rb, Rc, Rd, X1 and X2 are as defined for the general formula (II), one of P1 and P2 is a 2-cyanoethyl-N,N-diisopropylphosphoramidite group and the other of P1 and P2 is O-4,4′-dimethoxytrityl group. Further, each of Ra, Rb, Rc and Rd are, independently, H or a (C1-C6) alkyl group, and preferably H or a non-substituted (C1-C6) alkyl group.

[0284] As used herein, a (C1-C6) alkyl group encompass alkyl groups selected from a group comprising C1, C2, C3, C4, C5 and C6 alkyl groups.

[0285] In most preferred embodiments, X1 and X2 both represent a hydrogen atom.

[0286] In most preferred embodiments, Ra, Rb, Rc and Rd all represent a hydrogen atom.

### Embodiments of Compounds of Formula (II) Comprising Targeted Nucleotide Analogs

[0287] As previously specified herein, the present disclosure encompasses compounds of formula (II) wherein:
[0288] B is a heterocyclic nucleobase;
[0289] P1 and P2 are each, independently, H, a reactive phosphorus group or a protecting group;
[0290] Y is NR1 with R1 being a group —[C(═O)]m-R2-(O—CH₂—CH₂)p-R3, wherein
   [0291] m is an integer meaning 0 or 1,
   [0292] p is an integer ranging from 0 to 10,
   [0293] R2 is a (C1-C20) alkylene group optionally substituted by a (C1-C6) alkyl group, —O-Z3, —N(Z3)(Z4), —S-Z3, —CN, —C(═K)—O-Z3, —O—C(═K)-Z3, —C(═K)—N(Z3)(Z4), —N(Z3)-C(=K)-Z4, wherein
      [0294] K is O or S,
      [0295] each of Z3 and Z4 is, independently, H, a (C1-C6) alkyl group, optionally substituted by one or more groups selected from a halogen atom and a (C1-C6) alkyl group,
   [0296] and
   [0297] R3 is a cell targeting moiety,
[0298] X1 and X2 are each, independently, a hydrogen atom, a (C1-C6) alkyl group, and
[0299] each of Ra, Rb, Rc and Rd is, independently, H or a (C1-C6) alkyl group.

[0300] These compounds of formula (II) are encompassed in a more general family of compounds that may be termed “targeted nucleotide precursors” in the present disclosure. Such compounds of formula (II) wherein group R3 is present and represents a cell targeting moiety may be termed a “targeted nucleotide precursor of formula (II)” or a “targeted nucleotide precursor (II)” in the present disclosure.

[0301] The compounds of formula (II) that do not comprise a group R3 representing a cell targeting moiety are not targeted nucleotide precursors and are termed “non-targeted nucleotide precursors of formula (II)” or “non-targeted nucleotide precursors (II)” in the present disclosure.

[0302] In some embodiments of a targeted nucleotide precursors of formula (II), R1 is the group —[C(═O)]m-R2-(O—CH₂—CH₂)p-R3, m is 0, p is 0, R3 is a cell targeting moiety, B, P1, P2, Ra, Rb, Rc, Rd, X1, X2, and R2 are as in the general definition of the compound of formula (II). In some embodiments, R2 is an ethylene group and X1 and X2 are both an hydrogen atom. In some other of these embodiments, R2 is a pentylene group, and X1 and X2 are both an hydrogen atom. In some embodiments, R2 is a (C12) alkylene and X1 and X2 are both an hydrogen atom. In some embodiments of a compound of formula (II) R1 is the group —[C(═O)]m-R2-(O—CH₂—CH₂)p-R3, m is 0, p is an integer selected from the group consisting of 1, 2, 3 and 4, R3 is a cell targeting moiety and B, P1, P2, Ra, Rb, Rc, Rd, X1, X2 and R2, are as in the general definition of the compound of formula (II). In some embodiments, R2 is an ethylene group, p is 1 and X1 and X2 are both an hydrogen atom. In some embodiments, R2 is an ethylene group, p is 2 and X1 and X2 are both an hydrogen atom. In some embodiments, R2 is an ethylene group, p is 3 and X1 and X2 are both an hydrogen atom. In some embodiments, R2 is an ethylene group, p is 4 and X1 and X2 are both an hydrogen atom.

[0303] In some embodiments of a compound of formula (II), R1 is the group —[C(═O)]m-R2-(O—CH₂—CH₂)p-R3, m is 1, p is 0, R3 is a cell targeting moiety, and R2, B, P1, P2, Ra, Rb, Rc, Rd, X1, X2, are as in the general definition of the compound of formula (II). In some of these embodiments, R2 is a butylene, X1 and X2 each represent a hydrogen atom and B, P1, P2, Ra, Rb, Rc and Rd are as defined for the general formula (II). In some further of these embodiments, R2 is a (C11) alkylene, X1 and X2 both represent a hydrogen atom and B, P1, P2, Ra, Rb, Rc and Rd are as defined for the general formula (II).) In some still further of these embodiments, R2 is a methylene, X1 and X2 both represent a hydrogen atom and B, P1, P2, Ra, Rb, Rc and Rd are as defined for the general formula (II).

[0304] In some embodiments of a compound of formula (II) wherein R1 is the group —[C(═O)]m-R2-(O—CH₂—CH₂)p-R3, m is 1, p is selected from the group of integers consisting of 1 and 2, R3 is a cell targeting moiety, R2, B, P1, P2, Ra, Rb, Rc, Rd, X1, X2, are as in the general definition of the compound of formula (II). In some of these embodiments, R2 is a methylene group, p is 2, R3 is a cell targeting moiety, B, P1, P2, Ra, Rb, Rc, Rd, X1, X2, are as defined for the general formula (II). In some other of these embodiments, R2 is a methylene group, p is 1, R3 is a cell targeting moiety, B, P1, P2, Ra, Rb, Rc, Rd, X1, X2 are as defined for the general formula (II). In some embodiments of a compound of formula (I), Ra, Rb, Rc and Rd are an hydrogen atom. In general, group R3 encompass any cell targeting moiety known in the art, including any cell targeting moiety specified in the present disclosure, which include the cell targeting moieties that are specified for the description of targeted oligonucleotides in the present disclosure.

[0305] In some embodiments of a compound of formula (II), R3 is of the formula (III)

[chemical structure]

wherein

[0306] A1, A2 and A3 are OH or O—C(═O)-R4, wherein R4 is a (C1-C6)-alkyl or a (C6-C10)-aryl group.

[0307] A4 is OH, O—C(═O)-R4, NHC(═O)-R5, with R4 being defined as above and R5 is (C1-C6)-alkyl group, optionally substituted by an halogen atom.

[0308] In some preferred embodiments, A1, A2 and A3 are O—C(═O)-R4, wherein R4 is a (C1-C6)-alkyl or a (C6-C10)-aryl group.

[0309] In some preferred embodiments, A1, A2 and A3 are O—C(═O)-R4, R4 is a methyl or phenyl group.

[0310] In some preferred embodiments A1, A2 and A3 are O—C(═O)-R4, and R4 is methyl.

[0311] In some preferred embodiments, A4 is O—C(═O)-R4 or NHC(═O)-R5, wherein R4 is (C1-C6) alkyl or (C6-C10)-aryl group and R5 is (C1-C6)-alkyl group, optionally substituted by an halogen atom.

[0312] In some preferred embodiments, A1, A2 and A3 are O—C(═O)-R4, wherein R4 is methyl and A4 is O—C(═O)-R4 or NHC(═O)-R5, wherein each of R4 and R5 is methyl.

[0313] In some preferred embodiments, R3 is 3,4,6-Tri-O-acetyl-D-N-Acetylgalactosylamine of formula (III-A):

[chemical structure]

[0314] The present disclosure also relates to oligonucleotides comprising one or more nucleotide analogs that have been introduced in the oligonucleotides by using nucleotide analog precursors that are compounds of formula (II) specified herein.

[0315] The present disclosure pertains to single-stranded oligonucleotides and to double-stranded oligonucleotides, and especially siRNAs, comprising one or more hybridizing nucleotide analogs of formula (I-A) and possibly also one or more nucleotide analogs of formula (I-B), as it is described in detail elsewhere herein, thus which hybridizing nucleotide analogs of formula (I-A) are not at the 5′-overhang nor at the 3′-overhang, when present, of the antisense strand oligonucleotide thereof.

[0316] The present disclosure pertains to single stranded oligonucleotides and to double stranded oligonucleotides, and especially siRNAs, comprising one or more hybridizing nucleotide analogs of formula (I-A) in the hybridizing region of the antisense strand oligonucleotide, and possibly one or more hybridizing nucleotide analogs (I-A) in the sense strand oligonucleotide. Further, the double stranded oligonucleotides, and especially siRNAs may comprise one or more non-targeting nucleotide analogs at the 5′-overhangs and 3′-overhangs or both 5′-overhangs and 3′-overhangs, when present, of the sense and antisense strand oligonucleoitdes and possibly one or more targeted nucleotide analogs (I-B) at the 5′-overhangs and 3′-overhangs or both 5′-overhangs and 3′-overhangs of the sense and antisense strand oligonucleoitdes.

[0317] Nucleotide analogs of formula (I-A) and (I-B) are further detailed below.

[0318] Nucleotide Analogs of Formula (I-A) and (I-B)

[0319] Compounds of formula (II) disclosed herein are nucleotide analog building blocks, called also “nucleotide analog precursors” that have been conceived to be included as monomer units of oligomeric compounds, particularly as monomer units of oligonucleotides, including as monomer units of double-stranded RNA (“dsRNA”) oligomers, and especially as monomer units of siRNAs. Incorporation of nucleotide analog precursors, described herein under compounds of formula (II) into an oligonucleotide leads to presence, in the said oligonucleotide, of the corresponding monomer units which are described herein as compounds of formula (I), which compounds of formula (I) consist either (i) of nucleotide analogs of formula (I-A) or (ii) of nucleotide analogs of formula (I-B).

[0320] As it is further described below, nucleotide analogs of formula (I-A) consist of compounds of formula (I) wherein group R3 does not consist of a cell targeting moiety. Also, nucleotide analogs of formula (I-B) consist of compounds of formula (I) wherein group R3 consists of a cell targeting moiety.

[0321] The present disclosure also relates to a nucleotide analog of formula (I):

[chemical structure]

[0322] Wherein
[0323] B is a heterocyclic nucleobase;
[0324] one of L1 and L2 is an internucleoside linking group linking the compound of formula (I) to a nucleotide residue and the other of L1 and L2 is H, a protecting group, a phosphorus moiety or an internucleoside linking group linking the compound of formula (I) to a nucleotide
   [0325] Y is O, NH, NR1 or N—C(═O)-R1, wherein R1 is:
      [0326] a (C1-C20) alkyl group,
   [0327] optionally substituted by one or more groups selected from an halogen atom, a (C1-C6) alkyl group, a (C3-C8) cycloalkyl group, a (C3-C14) heterocycle, a (C6-C14) aryl group, a (C5-C14) heteroaryl group, —O-Z1, —N(Z1)(Z2), —S-Z1, —CN, —C(=J)-O-Z1, —O—C(=J)-Z1, —C(=J)-N(Z1)(Z2), —N(Z1)-C(=J)-Z2, wherein
      [0328] J is O or S,
      [0329] each of Z1 and Z2 is, independently, H, a (C1-C6) alkyl group, optionally substituted by one or more groups selected from a halogen atom and a (C1-C6) alkyl group,
      [0330] a (C3-C8) cycloalkyl group, optionally substituted by one or more groups selected from a halogen atom and a (C1-C6) alkyl group,
      [0331] a group —[C(═O)]m-R2-(O—CH₂—CH₂)p-R3, wherein
         [0332] m is an integer meaning 0 or 1,
   [0333] p is an integer ranging from 0 to 10,
   [0334] R2 is a (C1-C20) alkylene group optionally substituted by a (C1-C6) alkyl group, —O-Z3, —N(Z3)(Z4), —S-Z3, —CN, —C(═K)—O-Z3, —O—C(═K)-Z3, —C(═K)—N(Z3)(Z4), and —N(Z3)-C(=K)-Z4, wherein
      [0335] K is O or S,
   [0336] each of Z3 and Z4 is, independently, H, a (C1-C6) alkyl group, optionally substituted by one or more groups selected from a halogen atom and a (C1-C6) alkyl group,
      [0337] and
      [0338] R3 is selected from the group consisting of a hydrogen atom, a (C1-C6) alkyl group, a (C1-C6) alkoxy group, a (C3-C8) cycloalkyl group, a (C3-C14) heterocycle, a (C6-C14) aryl group or a (C5-C14) heteroaryl group,
      [0339] or
      [0340] R3 is a cell targeting moiety,
[0341] X1 and X2 are each, independently, a hydrogen atom, a (C1-C6) alkyl group, and
[0342] each of Ra, Rb, Rc and Rd is, independently, H or a (C1-C6) alkyl group,
   as well as any isomer thereof, such as stereoisomer, or a pharmaceutically acceptable salt thereof.

[0343] In some preferred embodiments of an oligonucleotide as described herein, in a compound of formula (I), Y is O.

[0344] In some other preferred embodiments of an oligonucleotide as described herein, in a compound of formula (I), Y is NR1 or N—C(═O)-R1, with R1 being as defined for the general formula (I).

[0345] In some embodiments wherein Y is NR1, R1 is a (C1-C20) alkyl group optionally substituted by one or more groups selected from an halogen atom, a (C1-C6) alkyl group, a (C3-C8) cycloalkyl group, a (C3-C14) heterocycle, a (C6-C14) aryl group, a (C5-C14) heteroaryl group, —O-Z1, —N(Z1)(Z2), —S-Z1, —CN, —C(=J)-O-Z1, —O—C(=J)-Z1, —C(=J)-N(Z1)(Z2), —N(Z1)-C(=J)-Z2, wherein
[0346] J is O or S,
[0347] each of Z1 and Z2 is, independently, H, a (C1-C6) alkyl group, optionally substituted by one or more groups selected from a halogen atom and a (C1-C6) alkyl group, in the form of the base or of an addition salt with an acid.

[0348] In some of these embodiments wherein Y is NR1, R1 is a non-substituted (C1-C20) alkyl group and L1, L2, Ra, Rb, Rc, Rd, X1, X2, R2, R3 and B have the same meaning as defined for the general formula (I), or a pharmaceutically acceptable salt thereof.

[0349] In some of the embodiments wherein Y is NR1, R1 is a non-substituted (C1-C16) alkyl group, which includes an alkyl group selected from a group comprising methyl, isopropyl, butyl, octyl, hexadecyl, and L1, L2 Ra, Rb, Rc, Rd, X1, X2 and B have the same meanings as defined for the general formula (I).

[0350] In some embodiments wherein Y is NR1, R1 is a methyl group, Ra, Rb, Rc, Rd, X1 and X2 are a hydrogen atom, and L1 and L2 are as defined for the general formula (I).

[0351] In some embodiments wherein Y is NR1, R1 is an isopropyl group, Ra, Rb, Rc, Rd, X1 and X2 are a hydrogen atom, and L1 and L2 are as defined for the general formula (I).

[0352] In some embodiments, wherein Y is NR1, R1 is a methyl group substituted by a phenyl group, and L1, L2, Ra, Rb, Rc, Rd, X1, X2, R2, R3 and B have the same meaning as defined for the general formula (I), or a pharmaceutically acceptable salt thereof.

[0353] In some embodiments wherein Y is NR1, R1 is a butyl group, Ra, Rb, Rc, Rd, X1 and X2 are a hydrogen atom, and L1 and L2 are as defined for the general formula (I).

[0354] In some embodiments wherein Y is NR1, R1 is an octyl group, Ra, Rb, Rc, Rd, X1 and X2 are a hydrogen atom, and L1 and L2 are as defined for the general formula (I).

[0355] In some embodiments wherein Y is NR1, R1 is a linear C16 alkyl group, Ra, Rb, Rc, Rd, X1 and X2 are a hydrogen atom, and L1 and L2 are as defined for the general formula (I) .

[0356] In further embodiments of a compound of formula (I) wherein Y is NR1, R1 is a (C1-C20) alkyl group which is substituted as defined in the general formula (I), which includes a C1, C2 or C3 alkyl group which is substituted as defined in the general formula (I).

[0357] In some of these further embodiments, R1 is an (C1-C20) alkyl group which is substituted by one or more groups selected from an halogen atom, a (C1-C6) alkyl group, a (C3-C8) cycloalkyl group, a (C3-C14) heterocycle, a (C6-C14) aryl group and a (C5-C14) heteroaryl group.

[0358] In some of these further embodiments, R1 is an (C1-C20) alkyl group which is substituted by a (C6-C14) aryl group and L1, L2 Ra, Rb, Rc, Rd, X1, X2 and B have the same meaning as defined for the general formula (I).

[0359] In some embodiments of a compound of formula (I) wherein Y is NR1, R1 is a (C1-C20) alkyl group which is substituted by a (C6-C14) aryl group. These embodiments encompass a compound of formula (I) wherein Y is NR1, R1 is a methylene group which is substituted by an aryl group. These embodiments also encompass a compound of formula (I) wherein Y is NR1, R1 is a (C1-C20) alkyl group which is substituted by a phenyl group.

[0360] In some embodiments of a compound of formula (I) wherein Y is NR1, R1 is a methyl group which is substituted by a non-substituted phenyl group, Ra, Rb, Rc, Rd are each a hydrogen atom, and L1 and L2 are as defined in the general formula (I).

[0361] In further embodiments of a compound formula (I) wherein Y is NR1, R1 is a (C3-C8) cycloalkyl group, optionally substituted by one or more groups selected from a halogen atom and a (C1-C6) alkyl group, and L1, L2 Ra, Rb, Rc, Rd, X1, X2 and B have the same meaning as defined for the general formula (I).

[0362] In some of these further embodiments of a compound of formula (I) wherein Y is NR1, R1 is a cyclohexyl group, and L1, L2, Ra, Rb, Rc, Rd, X1, X2, R2, R3 and B have the same meaning have the same meaning as defined for the general formula (I), or a pharmaceutically acceptable salt thereof.

[0363] In some of these further embodiments, of a compound formula (I) wherein Y is NR1, R1 is a non-substituted cyclohexyl, Ra, Rb, Rc, Rd, X1, X2 are each a hydrogen atom, and L1 and L2 are as defined for the general formula (I).

[0364] In some other embodiments of an oligonucleotide of formula (I), Y is N—C(═O)-R1, wherein R1 is a (C1-C20) alkyl group, R1 is selected from a group comprising methyl and pentadecyl and L1, L2, Ra, Rb, Rc, Rd, X1, X2, R2, R3 and B have the same meaning as defined for the general formula (I), or a pharmaceutically acceptable salt thereof.

[0365] In some other embodiments of an oligonucleotide of formula (I), Y is N—C(═O)-R1, wherein R1 is a (C1-C20) alkyl group, optionally substituted by one or more groups selected from an halogen atom, a (C1-C6) alkyl group, a (C3-C8) cycloalkyl group, a (C3-C14) heterocycle, a (C6-C14) aryl group, a (C5-C14) heteroaryl group, —O-Z1, —N(Z1)(Z2), —S-Z1, —CN, —C(=J)-O-Z1, —O—C(=J)-Z1, —C(=J)-N(Z1)(Z2), and —N(Z1)-C(=J)-Z2, wherein
[0366] J is O or S, and
[0367] each of Z1 and Z2 is, independently, H, a (C1-C6) alkyl group, optionally substituted by one or more groups selected from a halogen atom and a (C1-C6) alkyl group, and
   L1, L2, Ra, Rb, Rc, Rd, X1, X2 and B have the same meanings as defined for the general formula (II)

[0368] In some of the embodiments wherein Y is N—C(═O)-R1, R1 is an optionally substituted (C1-C20) alkyl group, which includes an optionally-substituted (C1-C15) alkyl group, and L1, L2, Rb, Rc, Rd, X1, X2 and B have the same meanings as defined for the general formula (I).

[0369] In some of the embodiments wherein Y is N—C(═O)-R1, R1 is a non-substituted (C1-C20) alkyl group, which includes a non-substituted (C1-C15) alkyl group, and L1, L2 Ra, Rb, Rc, Rd, X1, X2 and B have the same meanings as defined for the general formula (I).

[0370] According to some of these embodiments wherein Y is N—C(═O)-R1, R1 is selected from a group comprising methyl and pentadecyl, and L1 and L2 and B have the same meanings as defined for the general formula (I). These embodiments encompass compounds of formula (II) wherein Y is N—C(═O)-R1, R1 is methyl group, Ra, Rb, Rc, Rd, X1, X2 each represent a hydrogen atom and B, L1 and L2 are as defined in the general formula (I). These embodiments also encompass compounds of formula (I) wherein Y is N—C(═O)-R1, R1 is a pentadecyl group, Ra, Rb, Rc, Rd, X1, X2 each represent a hydrogen atom and B, L1 and L2 are as defined in the general formula (I).

[0371] The nucleotide analogs of formula (I), either consisting of nucleotide analogs of formula (I-A) or of nucleotide analogs of formula (I-B), can exist in the form of free base or of addition salts with acids. The nucleotide analogs of formula (I), either consisting of nucleotide analogs of formula (I-A) or of nucleotide analogs of formula (I-B), can also exist in form of their pharmaceutically acceptable salts, that also come within the present disclosure.

### Embodiments of Nucleotide Analogs of Formula (I-B), Also Termed Targeted Nucleotide Analogs

[0372] As previously specified herein, the present disclosure also encompasses nucleotide analogs of formula (I-B) wherein:
[0373] B is a heterocyclic nucleobase;
[0374] one of L1 and L2 is an internucleoside linking group linking the compound of formula (I) to a nucleotide residue and the other of L1 and L2 is H, a protecting group, a phosphorus moiety or an internucleoside linking group linking the compound of formula (I) to a nucleotide residue;
[0375] Y is NR1 and R1 is a group —[C(═O)]m-R2-(O—CH₂—CH₂)p-R3, wherein
   [0376] m is an integer meaning 0 or 1,
   [0377] p is an integer ranging from 0 to 10,
   [0378] R2 is a (C1-C20) alkylene group optionally substituted by a (C1-C6) alkyl group, —O-Z3, —N(Z3)(Z4), —S-Z3, —CN, —C(═K)—O-Z3, —O—C(═K)-Z3, —C(═K)—N(Z3)(Z4), —N(Z3)-C(═K)-Z4, wherein
      [0379] K is O or S,
      [0380] each of Z3 and Z4 is, independently, H, a (C1-C6) alkyl group, optionally substituted by one or more groups selected from a halogen atom and a (C1-C6) alkyl group,
   [0381] and
   [0382] R3 is a cell targeting moiety,
[0383] X1 and X2 are each, independently, a hydrogen atom, a (C1-C6) alkyl group, and
[0384] each of Ra, Rb, Rc and Rd is, independently, H or a (C1-C6) alkyl group,
   [0385] in the form of the base or of an addition salt with an acid,
   [0386] as well as any isomer thereof, such as stereoisomer, or a pharmaceutically acceptable salt thereof.

[0387] These compounds of formula (I-B) are encompassed in a more general family of compounds that may be termed “targeted nucleotide analogs” in the present disclosure.

[0388] In some embodiments of a targeted nucleotide analogs of formula (I-B) wherein R1 is the group —[C(═O)]m-R2-(O—CH₂—CH₂)p-R3, m is 0, p is 0, R3 is a cell targeting moiety, B, P1, P2, Ra, Rb, Rc, Rd, X1, X2, and R2 are as in the general definition of the compound of formula (I-B).

[0389] In some embodiments, R2 is an ethylene group and X1 and X2 are both an hydrogen atom, B, P1, P2, Ra, Rb, Rc, Rd, are as in the general definition of the compound of formula (I-BI).

[0390] In some other of these embodiments, R2 is a pentylene group and X1 and X2 are both an hydrogen atom, B, P1, P2, Ra, Rb, Rc, Rd, are as in the general definition of the compound of formula (I-B).

[0391] In some other of these embodiments, R2 is a (C12) alkylene group and X1 and X2 are both an hydrogen atom, B, P1, P2, Ra, Rb, Rc, Rd, are as in the general definition of the compound of formula (I-B).

[0392] In some embodiments of a compound of formula (I-B) wherein R1 is the group —[C(═O)]m-R2-(O—CH₂—CH₂)p-R3, m is 0, p is selected from the group of integers consisting of 1, 2, 3 and 4, R3 is a cell targeting moiety and B, L1, L2, Ra, Rb, Rc, Rd, X1, X2 and R2, are as in the general definition of the compound of formula (II). In some of these embodiments, R2 is an ethylene group, p is 1 and X1 and X2 are both a hydrogen atom. In still further of these embodiments, R2 is an ethylene group, p is 2 and X1 and X2 are both a hydrogen atom. In yet further of these embodiments, R2 is an ethylene group, p is 3 and X1 and X2 are both a hydrogen atom. In still other of these embodiments, R2 is an ethylene group, p is 4 and X1 and X2 are both a hydrogen atom.

[0393] In some embodiments of a compound of formula (I-B) wherein R1 is the group —[C(═O)]m-R2-(O—CH₂—CH₂)p-R3, m is 1, p is 0, R3 is a cell targeting moiety, and R2, B, L1, L2, Ra, Rb, Rc, Rd, X1, X2, are as in the general definition of the compound of formula (I-B).

[0394] In some of these embodiments, R2 is a butylene, X1 and X2 both represent a hydrogen atom and B, L1, L2, Ra, Rb, Rc and Rd are as defined for the general formula (I-B).

[0395] In some further of these embodiments, R2 is a (C11) alkylene, X1 and X2 both represent a hydrogen atom and B, L1, L2, Ra, Rb, Rc and Rd are as defined for the general formula (I-B).

[0396] In still some further of these embodiments, R2 is a methylene, X1 and X2 both represent a hydrogen atom and B, L1, L2, Ra, Rb, Rc and Rd are as defined for the general formula (I-B).

[0397] In some embodiments of a compound of formula (II) wherein R1 is the group —[C(═O)]m-R2-(O—CH₂—CH₂)p-R3, m is 1, p is selected from the group of integers consisting of 1 and 2, R3 is a cell targeting moiety, R2, B, L1, L2, Ra, Rb, Rc, Rd, X1, X2, are as in the general definition of the compound of formula (I-B).

[0398] In some of these embodiments, R2 is a methylene group, p is 2, R3 is a cell targeting moiety, B, L1, L2, Ra, Rb, Rc, Rd, X1, X2, are as defined for the general formula (I-B).

[0399] In some other of these embodiments, R2 is a methylene group, p is 1, R3 is a cell targeting moiety, B, L1, L2, Ra, Rb, Rc, Rd, X1, X2 are as defined for the general formula (I-B).

[0400] In general, group R3 encompass any cell targeting moiety known in the art, including any cell targeting moiety specified in the present disclosure, which include the cell targeting moieties that are specified for the description of targeted oligonucleotides in the present disclosure.

[0401] In some embodiments of a compound of formula (I-B), R3 is of the formula (III):

[chemical structure]

wherein A1, A2 and A3 are OH,

[0402] A4 is OH or NHC(═O)-R5, wherein R5 is a (C1-C6) alkyl group, optionally substituted by an halogen atom.

[0403] In some embodiments, R3 is N-acetyl-galactosamine of formula (III-B):

[chemical structure]

[0404] According to the present disclosure, reference to “GalNAc” or “N-acetyl galactosamine” includes both the β-form: 2-(Acetylamino)-2-deoxy-β-D-galactopyranose and the α-form: 2-(Acetylamino)-2-deoxy-α-D-galactopyranose. In certain embodiments, both the β-form: 2-(Acetylamine)-2-deoxy-β-D-galactopyranose and α-form; 2-(Acetylamino)-2-deoxy-α-D-galactopyranose may be used interchangeably.

[0405] In an oligonucleotide of formula (I-B), B is a heterocyclic nucleobase moiety. As used herein, the term “heterocyclic nucleobase” refers to an optionally substituted nitrogen-containing heterocycle that is covalently linked to the dioxane ring or the morpholino ring. In some embodiments, the heterocyclic nucleobase can be selected from an optionally substituted purine-base, an optionally substituted pyrimidine-base. The term “purine-base” is used herein in its ordinary sense as understood by those skilled in the art, and includes its tautomers. Similarly, the term “pyrimidine-base” is used herein in its ordinary sense as understood by those skilled in the art, and includes its tautomers. A non-limiting list of optionally substituted purine-bases includes purine, adenine, guanine, hypoxanthine, xanthine, alloxanthine, 7-alkylguanine (e.g. 7-methylguanine), theobromine, caffeine, uric acid and isoguanine. Examples of pyrimidine-bases include, but are not limited to, cytosine, thymine, uracil, 5,6-dihydrouracil and 5-alkylcytosine (e.g., 5-methylcytosine). Other non-limiting examples of heterocyclic bases include diaminopurine, 8-oxo-N⁶alkyladenine (e.g., 8-oxo-N⁶methyladenine), 7-deazaxanthine, 7-deazaguanine, 7-deazaadenine, N⁴N⁴ethanocytosin, N^{<6>},N^{<6>}-ethano-2,6-diaminopurine, 5-halouracil (e.g., 5-fluorouracil and 5-bromouracil), pseudoisocytosine, isocytosine, isoguanine, 1,2,4-triazole-3-carboxamides and other heterocyclic bases described in U.S. Pat. Nos. 5,432,272 and 7,125,855, which are incorporated herein by reference for disclosing additional heterocyclic bases.

[0406] In some embodiments, B is selected from a group comprising a pyrimidine, a substituted pyrimidine, a purine and a substituted purine.

[0407] In preferred embodiments, B is selected from a group comprising Adenine, Thymine, Uracil, Guanine and Cytosine (i.e., Adenyl, Thyminyl, Uracyl, Guanyl and Cytosyl groups).

[0408] As already mentioned, in an oligonucleotide comprising nucleotide analogs of formula (I-B), one group among groups L1 and L2 is an internucleoside linking group linking the compound of formula (I) to a nucleotide residue, i.e. to the adjacent nucleotide residue, and the other group among L1 and L2 groups is H, a protecting group, or an internucleoside linking group linking the compound of formula (I-B) to a nucleotide residue, i.e. to the adjacent nucleotide residue.

[0409] In addition, the herein described examples of double stranded oligonucleotides incorporating one or more compounds of formula (I) with a targeting moiety attached to the morpholine-nitrogen (GalNAc residue), show a robust delivery into the liver, leading to an in vivo knock-down of the target mRNA and corresponding protein levels.

[0410] Unexpectedly it has been demonstrated a significant improvement of the in vivo behaviour of double stranded oligonucleotides (in particular the in vivo duration of action), when combining targeted compounds of formula (I) and non-targeted compounds of formula (I) within one double stranded oligonucleotide; this also may be shown wherein the sense strand does not contain any phosphorothioate groups.

[0411] SiRNAs having incorporated one or more compounds of formula (I) in the sense strand, in the antisense strand or in both sense and antisense strands, and especially in the sense strand, also exert an efficient target gene silencing activity in vivo. The target gene silencing activity may be controlled according to (i) the embodiment(s) of the compounds of formula (I) present therein, (ii) the number of compounds of formula (I) present therein, and (iii) the location of the compound(s) of formula (I) within the sense strand or antisense strand of the siRNAs.

[0412] Importantly, siRNAs having incorporated one or more compounds of formula (I) are devoid of in vivo side effects at a dose range where those siRNAs are shown to exert a target gene silencing effect.

[0413] For the purpose of illustration, and without limiting the present disclosure, double-stranded oligonucleotides may also comprise one or more nucleotides on the sense and/or the anti-sense strands that are modified.

[0414] The modification may be selected from substitutions or insertions with analogues of nucleic acids or bases and chemical modification of the base, sugar or phosphate moieties. The selected modifications may each and individually be selected among 3′-terminal deoxy-thymine, 2′-O-methyl, a 2′-deoxy modification, a 2′-desoxy-fluoro, a 2′-amino modification, a 2′-alkyl modification, a phosphorothioate modification, a phosphoramidate modification, a 5′-phosphorothioate group modification, a 5′-phosphate or 5′-phosphate mimic modification and a cholesteryl derivative or a dodecanoic acid bisdecylamide group modification and/or the modified nucleotide may be any one of a locked nucleotide, an abasic nucleotide or a non-natural base comprising nucleotide. One of the preferred embodiments may be at least one modification being 2′-O-methyl and/or at least one modification being 2′-desoxy-fluoro.

[0415] Other examples of modified oligonucleotides, as used herein, can include one or more of the following: modification, e.g., replacement of one or both of the non-linking phosphate oxygens and/or of one or more of the linking phosphate oxygens; replacement of the phosphate moiety; modification or replacement of a naturally occurring base; replacement or modification of the ribose-phosphate backbone; modification of the 3′-end or 5′-end of the RNA, e.g., removal, modification or replacement of a terminal phosphate group or conjugation of a moiety, e.g., a fluorescently labeled moiety, to either the 3′- or 5′-end of RNA.

[0416] Methods for the Synthesis of Nucleotide Analog Precursors of Formula (II)

[0417] Nucleotide analog precursors of formula (II) may be prepared according to the detailed methods illustrated in the disclosure herein.

[0418] The present disclosure relates to a method for preparing a compound of formula (II-1), comprising the steps of:

[0419] a) oxidation of a compound of formula (X)

[chemical structure]

[0420] wherein B is a heterocyclic nucleobase and P1 and P2 each represents independently a protecting group as defined in the general formula (II) herein

[0421] by reaction of the compound of formula (X) with an oxidizing reagent, such as sodium periodate (NalO₄), whereby the following compound of formula (XI) is obtained:

[chemical structure]

and

[0422] b) subjecting the compound of formula (XI) to a step of reductive amination in the presence of the compound of formula (XII)

R1-NH₂ (XII)

[0423] wherein R1 is as defined in the general formula (I) herein,

[0424] for obtaining the compound of formula (II-1):

[chemical structure]

[0425] wherein B is a heterocyclic nucleobase and P1 and P2 each represent independently a protecting group as defined in the general formula (II).

[0426] The present disclosure also relates to a method for preparing a compound of formula (II-2) comprising the steps of:

[0427] a) oxidation of a compound of formula (X)

[chemical structure]

[0428] wherein B is a heterocyclic nucleobase and P1 and P2 each represents independently a protecting group as defined in the general formula (II) herein

[0429] by reaction of the compound of formula (X) with an oxidizing reagent, such as sodium periodate (NalO₄), whereby the following compound of formula (XI) is obtained:

[chemical structure]

and

[0430] b) subjecting the compound of formula (XI) to a step of reductive amination in the presence of an amine as e.g. ammonia or ammonium diborate for obtaining the compound of formula (XIII)

[chemical structure]

[0431] c) subjecting the compound of formula (XIII) to a step of amide coupling in the presence of the compound of formula (XIV)

R1-C(═O)—OH (XIV)

[0432] wherein R1 is as defined in the general formula (II) herein,

[0433] for obtaining a compound of formula (II-2)

[chemical structure]

[0434] wherein B is a heterocyclic nucleobase and P1 and P2 each represents independently a protecting group as defined in the general formula (II) and R1 is as defined in the general formula (II).

[0435] d) subjecting the compound of formula (XIII) to a step of reductive amination in the presence of aldehydes or ketones for obtaining the compound of formula (II-1)

[chemical structure]

[0436] The present disclosure also relates to a method for preparing a compound of formula (II-3)

[chemical structure]

[0437] comprising the steps of reacting a compound of formula (XV)

[chemical structure]

[0438] wherein A1, A2, A3 and A4 are as defined in the formula (III) or (III-A) herein, —Y—CHO is transferred by the reductive amination reaction to —Y—CH2-, which equals X and X is a group of formula —(CH2-CH2-O)p-R2-, wherein p and R2 are as defined in the general formula (I), with the compound of formula (XIII)

[chemical structure]

[0439] wherein B is a heterocyclic nucleobase and P1 and P2 each represent independently a protecting group as defined in the general formula (II),

[0440] by reductive amination, for obtaining the compound of formula (II-3)

[chemical structure]

[0441] The above method is illustrated in Scheme 2 in the present disclosure.

[0442] The present disclosure also pertains to a method for obtaining a compound of formula (II-4)

[chemical structure]

[0443] comprising the steps of:

[0444] a) reacting a compound of formula (XVI)

[chemical structure]

[0445] wherein A1, A2, A3 and A4 are as defined in the formula (III) or (III-A) herein and X is a group of formula —(CH2-CH2-O)p-R2-, wherein p and R2 are as defined in the general formula (I), with the compound of formula (XIII)

[chemical structure]

[0446] wherein B is a heterocyclic nucleobase and P1 and P2 each represent independently a protecting group as defined in the general formula (II),

[0447] under peptide coupling conditions, for obtaining the compound of formula (II-4)

[0448] The above method is illustrated in Scheme 2 in the present disclosure.

[0449] The present disclosure further relates to a method for preparing a compound of formula (II-5) comprising the steps of:

[0450] a) reducing the compound of formula (XI)

[chemical structure]

[0451] wherein B is a heterocyclic nucleobase and P1 and P2 each represent independently a protecting group as defined in the general formula (II), so as to obtain a compound of formula (XVII)

[chemical structure]

[0452] b) transferring the compound of formula (XVII) in the presence of a sulfonylating agent (e.g. p-toluene-sulfonylchloride Ts-Cl, methanesulfonylchloride Ms-Cl), so as to obtain the compound of formula (XVIII)

[chemical structure]

[0453] wherein Ts represents a tosyl group,

[0454] c) subjecting the compound of formula (XVIII) to a basic condition, so as to obtain the compound of formula (II-5)

[chemical structure]

[0455] The above method is illustrated in Scheme 3 in the present disclosure.

[0456] The present disclosure also concerns an alternative method for preparing a compound of formula (II-5) comprising the steps of:

[0457] a) transferring the compound of formula (XVII)

[chemical structure]

[0458] in the present of an excess of a sulfonylating agent (e.g. p-toluene-sulfonylchloride Ts-Cl, methanesulfonylchloride Ms-Cl), so as to obtain the compound of formula (XIX)

[chemical structure]

[0459] wherein Ts represents a tosyl group,

[0460] b) deprotecting the compound of formula (XIX) by removal of group P1 for obtaining the compound of formula (XX)

[chemical structure]

[0461] c) subjecting the compound of formula (XX) to a basic condition, so as to obtain the compound of formula (XXI)

[chemical structure]

and

[0462] d) replacing the tosyl group by the protecting group P1, so as to obtain the compound of formula (II-5)

[chemical structure]

[0463] The above method is illustrated in Scheme 3 in the present disclosure.

[0464] Compounds of formula (II), (II-1), (II-2), (II-3), (II-4) and (II-5) may be prepared according to the detailed methods illustrated in the following schemes 1 to 8 disclosed herein.

[0465] Starting from commercially available ribose derivative G1, the two primary OH-groups can be differentiated by selective benzylation following standard literature protocols. Standard protecting group modification of the resulting benzylether G2 leads to the fully protected ribose analog G3, which can be used as a glycosyl donor in the presence of the nucleobases B (e.g.: T, U, C^{Bzl}, I, G^{iBu}, A^{Bzl}), yielding the nucleoside derivatives G4 (Tetrahedron, 1998, 54, 3607-3630).

[chemical structure]

[0466] Starting with the nucleoside analogs G4, modification of the protecting group pattern by standard procedures leads to the intermediates G5, with orthogonal protecting groups P1 and P2 as defined in general formula (II) on the two primary alcohols and unprotected OH-groups at C2′ and C3′ of the ribose scaffold. The cis-orientation of the dihydroxy-functionality in the G5-compounds allows the oxidative cleavage of the C—C-bond between C2′ and C3′using NaIO₄ as oxidizing agent. The resulting dialdehyde can be isolated as monohydrate G6, which is transformed to the desired morpholine scaffolds by reductive amination reaction with a reducing agent, such as NaCNBH₃. Using an amine substrate such as ammonia or ammonium diborate leads to the morpholine intermediates G7 with a free NH-group in the morpholine scaffold. A second reductive amination reaction with the corresponding aldehydes or ketones in the presence of e.g. NaCNBH₃, yields in the alkylated morpholines G8, with R1 being as defined as in general formula (II). Alternatively, intermediates G6 can undergo a reductive amination reaction in the presence of the appropriate amines R1-NH₂, wherein R1 is as defined as in general formula (II), leading directly to the alkylated morpholines G8. The analogues acylated morpholines are obtained by standard peptide coupling reactions between the free morpholine building blocks G7 and the corresponding carboxylic acids R1-COOH, resulting in the amide intermediates G9.

[0467] Compounds G7, G8 and G9 consist of embodiments of a compound of formula (II) described in the present disclosure.

[0468] In analogy to the synthesis described in scheme 1 for the formation of compounds of the general formula (II), the herein described targeted compounds of general formula (II) can be prepared by reductive amination- or peptide coupling reactions using intermediate G7 as amine reagent. Using peracetylated N-Acetylgalactosamine G11 as protected cell targeting moiety, the syntheses of the compounds of general formula (II) are described in following scheme 2.

[chemical structure]

[0469] In the following, X is defined as the group -R2(OCH2-CH2)p- comprised in the group —[C(═O)]m-R2-(O—CH2-CH2)p-R3 as defined in the compounds of general formula (II).

[0470] Treating the peracetylated GalNAc-derivative G11 with ω-hydroxycarboxylic acidesters (HO—X—COOBn) under standard glycosylation conditions, leads, after ester cleavage, to the carboxylic acids G12, which form in the presence of the morpholine derivative G7 the desired amides G14 under peptide coupling conditions. Alternatively, glycosylation of G11 with ω-hydroxy-benzylethers (HO—X—OBn) delivers, after benzylether cleavage and oxidation of the corresponding alcohols the aldehyde intermediates G13. Reductive amination with the morpholine G7 as amine component yields in the formation of the alkylated morpholines G15. Compounds G14 and G15 are compounds of formula (II) as described in the present disclosure. A synthetic route to the compounds of general formula (II) in the dioxane series (Y is O) is shown in scheme 3.

[chemical structure]

[0471] Starting with the already described cis-diol intermediate G5 and its oxidative cleavage to the building block G6 (see scheme 1), treatment with a reducing agent such as sodium boronhydride leads to the diol intermediate G16 with two primary OH-groups at the 2′- and 3′-C. In the presence of sulfonylating agent such as p-toluene sulfonylchloride in stoichiometric amounts under basic conditions, the 2′-OH-functionality can be selectively tosylated, forming the mono-tosylate G17. Under basic conditions, using e.g. aqueous NaOH or NaOMe in MeOH, G17 undergoes nucleophilic substitution of the primary tosylate by the free OH-group at the 3′-C, which results in the formation of the desired dioxane scaffold G18.

[0472] Compound G18 consists of a compound of general formula (II) as described in the present disclosure.

[0473] Alternatively, the diol intermediate G16 can be bis-sulfonylated with for example an excess of p-toluene sulfonylchloride and increased reaction times, resulting in the bis-tosylate G19. After deprotection of one of the orthogonal protecting groups P1 or P2, the obtained primary alcohol G20 reacts in analogy to G17 (see scheme 3) under nucleophilic substitution and formation of the desired dioxane scaffold G21. The remaining tosylate can be replaced with sodium benzoate, yielding again a fully protected dioxane scaffold G18 with orthogonal protecting groups P1 and P2 at the primary hydroxyl groups.

[chemical structure]

[0474] The described building blocks of general formula (II) (G8, G9, G14, G15 and G18), with orthogonal protecting groups P1 and P2 are finally converted to the corresponding DMT-protected phosphoramidites, allowing their use as nucleotide precursors in the automated oligonucleotide synthesis.

[0475] For this purpose, the fully protected compounds of general formula (II) (G8, G9, G14, G15 and G18) are converted to the mono-DMT-protected intermediates G22 by standard protecting group modifications. Phosphitylation of the free OH-groups in the G22-building blocks by standard protocols results in the final DMT-protected phosphoramidites G23 as nucleotide precursors for the automated oligonucleotide synthesis.

[chemical structure]

[0476] Compound G23 is a compound of formula (II) wherein group P1 is a DMT protecting group and group P2 is a reactive phosphorous group consisting of a phosphoramidite group.

[0477] Depending on the protecting group modifications, which lead to the intermediates G22, (2S,6R)- and (2R,6R)-diastereomers of the compounds of general structures (II) can be synthesized.

[chemical structure]

[0478] The starting nucleotides at the 3′-end of an oligonucleotide single strand can be prepared by standard procedures with a universal solid support material (see experimental part, synthesis of oligonucleotides), reacting with the corresponding phosphoramidites G23 as first nucleotide scaffolds in the automated synthesis.

[0479] Preparation of Oligonucleotides Comprising Nucleotide Analogs of Formula (I-A) and Possibly Also (I-B)

[0480] An oligonucleotide for use in accordance with the present disclosure, which may also be termed “modified oligonucleotide” herein, may be prepared according to any useful technique, including the methods described herein, by using one or more nucleotide analog precursors of formula (II) as some of the starting building block(s) to be incorporated at selected position(s) of the growing chain of the final oligonucleotide, thus generating an oligonucleotide comprising one or more nucleotide analogs of formula (I), the one or more compounds of formula (I) being located at the selected position(s) of the final oligonucleotide.

[0481] Nucleotide analog precursors of formula (II) may be synthesized as described in the present disclosure.

[0482] A modified oligonucleotide of the present disclosure may be double-stranded with or without overhangs, or comprise at least a double-stranded portion. A double-stranded modified oligonucleotide may be formed from a single oligonucleotide chain comprising therein a first nucleotide sequence (e.g., a sense nucleotide sequence) and a second nucleotide sequence (e.g., an antisense nucleotide sequence) that is complementary to the first nucleotide sequence and hybridizes thereto, and wherein the second nucleotide sequence is also complementary to a target RNA sequence, the inhibition of which is sought. According to these embodiments, the first nucleotide sequence and the second nucleotide sequence may be on separate chains within the modified oligonucleotide; or on the same chain but separated by a spacer or an additional nucleotide sequence of an appropriate length so as to form an hairpin loop once the first nucleotide sequence hybridizes to the second nucleotide sequence.

[0483] In some embodiments, a modified oligonucleotide of the present invention is single-stranded, and may comprise either the sense- or antisense strand of a double-stranded RNA such as a siRNA.

[0484] Oligonucleotides of the present invention such as those comprising one or more nucleotide analogs of formula (I) may be chemically synthesized using protocols known in the art. See, e.g., Caruthers et al., 1992, Methods in Enzymology, 211:, 3-19; Thompson et al., International PCT Publication No. WO 99/54459; Wincott et al., 1995, Nucleic Acids Res., 23:2677-2684; Wincott et al., 1997, Methods Mol. Bio., 74:59; Brennan et al., 1998, Biotechnol Bioeng., 61:33-45; and Brennan, U.S. Pat. No. 6,001,311. The synthesis of oligonucleotides makes use of common nucleic acid protecting and coupling groups, such as dimethoxytrityl at the 5′-end, and phosphoramidites at the 3′-end. In certain embodiments, oligonucleotides comprising nucleotide analogs of formula (I) are synthesized, deprotected, and analyzed according to methods described in U.S. Pat. Nos. 6,995,259; 6,686,463; 6,673,918; 6,649,751; 6,989,442; and 7,205,399. In a non-limiting synthesis example, small scale syntheses are conducted on a 394 Applied Biosystems, Inc./Thermo Fischer Scientific Inc. synthesizer.

[0485] Alternatively, oligonucleotides comprising one or more nucleotide analogs of formula (I) can be synthesized separately and joined together post synthesis, for example, by ligation (Moore et al., 1992, Science 256:9923; Draper et al., International PCT Publication No. WO 93/23569; Shabarova et al., 1991, Nucleic Acids Research 19:4247; Bellon et al., 1997, Nucleosides & Nucleotides, 16:951; Bellon et al., 1997, Bioconjugate Chem., 8:204), or by hybridization following synthesis and/or deprotection. Various modified oligonucleotides according to the present disclosure may also be synthesized using the teachings of Scaringe et al., U.S. Pat. Nos. 5,889,136; 6,008,400; and 6,111,086.

[0486] Compositions

[0487] Certain aspects of the present disclosure relate to compositions (e.g., pharmaceutical compositions) comprising a dsRNA as described herein. In some embodiments, the composition (e.g., pharmaceutical composition) further comprises a pharmaceutically acceptable carrier. In some embodiments, the composition (e.g., pharmaceutical composition) is useful for treating a disease or disorder associated with the expression or activity of the targeted gene.

[0488] Compositions (e.g., pharmaceutical compositions) of the present disclosure are formulated based upon the mode of delivery, including, for example, compositions formulated for delivery to the liver via parenteral delivery.

[0489] The compositions (e.g., pharmaceutical composition) of the present disclosure may be administered in dosages sufficient to inhibit expression of the targeted gene. In some embodiments, a suitable dose of a dsRNA is in the range of 0.01 mg/kg-400 mg/kg body weight of the recipient.

[0490] One of ordinary skill in the art will appreciate that certain factors may influence the dosage and timing required to effectively treat a subject, including, but not limited to, severity of the disease or disorder, previous treatments, the general health and/or age of the subject, and one or more other diseases being present. Moreover, treatment of a subject with a therapeutically effective amount of a pharmaceutical composition can include a single treatment or a series of treatments. Estimates of effective dosages and in vivo half-lives for dsRNAs as disclosed herein may be made using conventional methodologies or on the basis of in vivo testing using an appropriate animal model.

[0491] dsRNA molecules of the present disclosure can be formulated in a pharmaceutically acceptable carrier or diluent. Pharmaceutically acceptable carriers can be liquid or solid, and may be selected with the planned manner of administration in mind so as to provide for the desired bulk, consistency, and other pertinent transport and chemical properties. Any known pharmaceutically acceptable carrier or diluent may be used, including, for example, water, saline solution, binding agents (e.g., polyvinylpyrrolidone or hydroxypropyl methylcellulose), fillers (e.g., lactose and other sugars, gelatin, or calcium sulfate), lubricants (e.g., starch, polyethylene glycol, or sodium acetate), disintegrates (e.g., starch or sodium starch glycolate), calcium salts (e.g., calcium sulfate, calcium chloride, calcium phosphate, etc.) and wetting agents (e.g., sodium lauryl sulfate).

[0492] dsRNA molecules of the present disclosure can be formulated into compositions (e.g., pharmaceutical compositions) containing the dsRNA admixed, encapsulated, conjugated, or otherwise associated with other molecules, molecular structures, or mixtures of nucleic acids. For example, a composition comprising one or more dsRNAs as described herein can contain other therapeutic agents such as other lipid lowering agents (e.g., statins). In some embodiments, the composition (e.g., pharmaceutical composition) further comprises a delivery vehicle (as described herein).

[0493] Vectors and dsRNA Delivery

[0494] A dsRNA of the present disclosure may be delivered directly or indirectly. In some embodiments, the dsRNA is delivered directly by administering a composition (e.g., pharmaceutical composition) comprising the dsRNA to a subject. In some embodiments, the dsRNA is delivered indirectly by administering one or more vectors described herein.

[0495] Delivery

[0496] A dsRNA of the present disclosure may be delivered by any method known in the art, including, for example, by adapting a method of delivering a nucleic acid molecule for use with a dsRNA (See e.g., Akhtar, S. et al. (1992) Trends Cell. Biol. 2(5): 139-144; WO 94/02595), or via additional methods known in the art (See e.g., Kanasty, R. et al. (2013) Nature Materials 12: 967-977; Wittrup, A. and Lieberman, J. (2015) Nature Reviews Genetics 16: 543-552; Whitehead, K. et al. (2009) Nature Reviews Drug Discovery 8: 129-138; Gary, D. et al. (2007) 121 (1-2): 64-73; Wang. J. et al. (2010) AAPS J. 12(4): 492-503; Draz, M. et al. (2014) Theranostics 4(9): 872-892; Wan, C. et al. (2013) Drug Deliv. And Transl. Res. 4(1): 74-83; Erdmann, V. A. and Barciszewski, J. (eds.) (2010) “RNA Technologies and Their Applications”, Springer-Verlag Berlin Heidelberg, DOI 10.1007/978-3-642-12168-5; Xu, C. and Wang, J. (2015) Asian Journal of Pharmaceutical Sciences 10(1): 1-12).

[0497] In some embodiments, a dsRNA of the present disclosure is delivered by a delivery vehicle comprising the dsRNA. In some embodiments, the delivery vehicle is a liposome, lipoplex, complex, or nanoparticle.

[0498] Liposomal Formulations

[0499] Liposomes are unilamellar or multilamellar vesicles which have a membrane formed from a lipophilic material and an aqueous interior. In some embodiments, a liposome is a vesicle composed of amphiphilic lipids arranged in a spherical bilayer or bilayers. The aqueous portion contains the composition to be delivered. Cationic liposomes possess the advantage of being able to fuse to the cell wall. Advantages of liposomes include, e.g., liposomes obtained from natural phospholipids are biocompatible and biodegradable; liposomes can incorporate a wide range of water and lipid soluble drugs; liposomes can protect encapsulated drugs in their internal compartments from metabolism and degradation (Rosoff, in Pharmaceutical Dosage Forms, Lieberman, Rieger and Banker (Eds.), 1988, Marcel Dekker, Inc., New York, N.Y., volume 1, p. 245). Important considerations in the preparation of liposome formulations are the lipid surface charge, vesicle size and the aqueous volume of the liposomes. For example, engineered cationic liposomes and sterically stabilized liposomes can be used to deliver the dsRNA. See, e.g., Podesta et al. (2009) Methods Enzymol. 464, 343-54; U.S. Pat. No. 5,665,710.

[0500] Nucleic Acid-Lipid Particles

[0501] In some embodiments, a dsRNA of the present disclosure is fully encapsulated in a lipid formulation, e.g., to form a nucleic acid-lipid particle, e.g., a SPLP, pSPLP, or SNALP. As used herein, the term “SNALP” refers to a stable nucleic acid-lipid particle, including SPLP. As used herein, the term “SPLP” refers to a nucleic acid-lipid particle comprising plasmid DNA encapsulated within a lipid vesicle. Nucleic acid-lipid particles, e.g., SNALPs, typically contain a cationic lipid, a non-cationic lipid, cholesterol and a lipid that prevents aggregation of the particle and increases circulation time (e.g., a PEG-lipid conjugate). SNALPs and SPLPs are useful for systemic applications, as they exhibit extended circulation lifetimes following intravenous (i.v.) injection and accumulate at distal sites (e.g., sites physically separated from the administration site). SPLPs include “pSPLP”, which include an encapsulated condensing agent-nucleic acid complex as set forth in PCT Publication No. WO 00/03683.

[0502] In some embodiments, dsRNAs when present in the nucleic acid-lipid particles are resistant in aqueous solution to degradation with a nuclease. Nucleic acid-lipid particles and their methods of preparation are disclosed in, e.g., U.S. Pat. Nos. 5,976,567; 5,981,501; 6,534,484; 6,586,410; and 6,815,432; and PCT Publication No. WO 96/40964.

[0503] In some embodiments, the nucleic acid-lipid particles comprise a cationic lipid. Any cationic lipid or mixture thereof known in the art may be used. In some embodiments, the nucleic acid-lipid particles comprise a non-cationic lipid. Any non-cationic lipid or mixture thereof known in the art may be used. In some embodiments, the nucleic acid-lipid particle comprises a conjugated lipid (e.g., to prevent aggregation). Any conjugated lipid known in the art may be used.

[0504] Additional Formulations

[0505] Factors that are important to consider in order to successfully deliver a dsRNA molecule in vivo include: (1) biological stability of the delivered molecule, (2) preventing nonspecific effects, and (3) accumulation of the delivered molecule in the target tissue. The nonspecific effects of a dsRNA can be minimized by local administration, for example by direct injection or implantation into a tissue or topically administering the preparation. For administering a dsRNA systemically for the treatment of a disease, the dsRNA may be modified or alternatively delivered using a drug delivery system; both methods act to prevent the rapid degradation of the dsRNA by endo and exo-nucleases in vivo. Modification of the RNA or the pharmaceutical carrier may also permit targeting of the dsRNA composition to the target tissue and avoid undesirable off-target effects. As described above, dsRNA molecules may be modified by chemical conjugation to lipophilic groups such as cholesterol to enhance cellular uptake and prevent degradation. In some embodiments, the dsRNA is delivered using drug delivery systems such as a nanoparticle, a dendrimer, a polymer, liposomes, or a cationic delivery system. Positively charged cationic delivery systems facilitate binding of a dsRNA molecule (negatively charged) and also enhance interactions at the negatively charged cell membrane to permit efficient uptake of a dsRNA by the cell. Cationic lipids, dendrimers, or polymers can either be bound to a dsRNA, or induced to form a vesicle or micelle (See e.g., Kim S. H. et al. (2008) Journal of Controlled Release 129(2):107-116) that encases a dsRNA. The formation of vesicles or micelles further prevents degradation of the dsRNA when administered systemically. Methods for making and administering cationic-dsRNA complexes are known in the art. In some embodiments, a dsRNA forms a complex with cyclodextrin for systemic administration.

[0506] Methods of Using dsRNA

[0507] Certain aspects of the present disclosure relate to methods for inhibiting the expression of a targeted gene in a mammal comprising administering an effective amount of one or more dsRNAs of the present disclosure, one or more vectors of the present disclosure, or a composition (e.g., pharmaceutical composition) of the present disclosure comprising one or more dsRNAs of the present disclosure. Certain aspects of the present disclosure relate to methods of treating and/or preventing one or more target gene-mediated diseases or disorders comprising administering one or more dsRNAs of the present disclosure and/or one or more vectors of the present disclosure and/or a composition (e.g., pharmaceutical composition) comprising one or more dsRNAs of the present disclosure. In some embodiments, downregulating target gene expression in a subject alleviates one or more symptoms of a targeted gene-mediated disease or disorder in the subject.

[0508] In some embodiments, expression of the target gene in the subject is inhibited by at least about 5%, at least about 10%, at least about 15%, at least about 20%, at least about 25%, at least about 30%, at least about 35%, at least about 40%, at least about 45%, at least about 50%, at least about 55%, at least about 60%, at least about 65%, at least about 70%, at least about 75%, at least about 80%, at least about 85%, at least about 90%, at least about 95%, at least about 99%, or about 100% after treatment as compared to pretreatment levels. In some embodiments, expression of the target gene is inhibited by at least about 1.1 fold, at least about 1.5 fold, at least about 2 fold, at least about 2.5 fold, at least about 3 fold, at least about 3.5 fold, at least about 4 fold, at least about 4.5 fold, at least about 5 fold, at least about 5.5 fold, at least about 6 fold, at least about 6.5 fold, at least about 7 fold, at least about 7.5 fold, at least about 8 fold, at least about 8.5 fold, at least about 9 fold, at least about 9.5 fold, at least about 10 fold, at least about 25 fold, at least about 50 fold, at least about 75 fold, or at least about 100 fold after treatment as compared to pretreatment levels. In some embodiments, the target gene is inhibited in the liver of the subject.

[0509] In some embodiments, the subject is human. In some embodiments, the subject has or has been diagnosed with a target gene-mediated disorder or disease. In some embodiments, the subject is suspected to have a target gene-mediated disorder or disease. In some embodiments, the subject is at risk for developing a target gene-mediated disorder or disease.

[0510] As it is understood from the content of the present disclosure, a dsRNA as described herein has its main characteristics lying in the presence of one or more nucleotide analogs of formula (II) comprised therein, which nucleotide analogs of formula (II) possess specific structural features of the “sugar-like” group thereof. A dsRNA as described herein is generally conceived for targeting a selected nucleic acid sequence comprised in a target nucleic acid of interest. Especially, embodiments of a dsRNA described herein consisting of siRNAs comprise an antisense strand that specifically hybridizes with a nucleic acid sequence comprised in a target nucleic acid of interest. A dsRNA or composition (e.g., pharmaceutical composition) described herein may be for use in the treatment of target gene-mediated disorder or disease. In particular, a dsRNA or composition (e.g., pharmaceutical composition) described herein, and especially a dsRNA comprising one or more targeted nucleotide analogs, and especially one or more targeted nucleotide analogs of formula (II), may be for use in the treatment of target gene-mediated disorder or disease wherein liver-targeting is needed.

[0511] Certain aspects of the present disclosure also relate to a method of delivery of nucleic acids to hepatocytes comprising contacting the hepatocyte with a dsRNA described herein.

[0512] A dsRNA or composition (e.g., pharmaceutical composition) described herein may be administered by any means known in the art, including, without limitation, oral or parenteral routes, including intravenous, intramuscular, subcutaneous, pulmonary, transdermal, and airway (aerosol) administration. Typically, when treating a mammal with hyperlipidemia, the dsRNA molecules are administered systemically via parenteral means. In some embodiments, the dsRNAs and/or compositions are administered by subcutaneous administration. In some embodiments, the dsRNAs and/or compositions are administered by intravenous administration. In some embodiments, the dsRNAs and/or compositions are administered by pulmonary administration.

[0513] A treatment or preventative effect of a dsRNA is evident when there is a statistically significant improvement in one or more parameters of disease status, or by a failure to worsen or to develop symptoms where they would otherwise be anticipated. For example, a favorable change of at least 10%, 15%, 20%, 25%, 30%, 35%, 40%, 45%, 50% or more in a measurable parameter of disease may be indicative of effective treatment. Efficacy for a given dsRNA or composition comprising the dsRNA may also be judged using an experimental animal model for the given disease or disorder known in the art. When using an experimental animal model, efficacy of treatment is evidenced when a statistically significant reduction in a marker or symptom is observed.

[0514] Kits and Articles of Manufacture

[0515] Certain aspects of the present disclosure relate to an article of manufacture or a kit comprising one or more of the dsRNAs, vector(s), or composition(s) (e.g., pharmaceutical composition(s) as described herein useful for the treatment and/or prevention of a target gene-mediated disorder or disease as described above. The article of manufacture or kit may further comprise a container and a label or package insert on or associated with the container. Suitable containers include, for example, bottles, vials, syringes, IV solution bags, etc. The containers may be formed from a variety of materials such as glass or plastic. The container holds a composition which is by itself or combined with another composition effective for treating or preventing the disease and may have a sterile access port (for example the container may be an intravenous solution bag or a vial having a stopper pierceable by a hypodermic injection needle). At least one active agent in the composition is a dsRNA described herein. The label or package insert indicates that the composition is used for treating a target-mediated disorder or disease. Moreover, the article of manufacture or kit may comprise (a) a first container with a composition contained therein, wherein the composition comprises a dsRNA described herein; and (b) a second container with a composition contained therein, wherein the composition comprises a second therapeutic agent. The article of manufacture or kit in this embodiment of the present disclosure may further comprise a package insert indicating that the compositions can be used to treat a particular disease. Alternatively, or additionally, the article of manufacture or kit may further comprise a second (or third) container comprising a pharmaceutically acceptable buffer, such as bacteriostatic water for injection (BWFI), phosphate-buffered saline, Ringer's solution and dextrose solution. It may further include other materials desirable from a commercial and user standpoint, including other buffers, diluents, filters, needles, and syringes.

[0516] Nucleic acid sequences are disclosed in the present specification and especially in the examples herein, that serve as references. The same sequences are also presented in a sequence listing formatted according to standard requirements for the purpose of patent matters. In case of any sequence discrepancy with the standard sequence listing, the sequences described in the present specification shall be the reference.

[0517] Without limiting the present disclosure, a number of embodiments of the present disclosure are described below for the purpose of illustration.

### EXAMPLES

[0518] Nomenclature has been established according to IUPAC rules.

[0519] Unless otherwise indicated the following LC-MS methods have been used:

[0520] A:
[0521] Column: Waters ACQUITY UPLC BEH C18, 1.7 μm, 2.1×50 mm
[0522] Eluent: (H₂O+0.05% FA)/(ACN+0.035% FA) 95:5 (0 min) to 5:95 (2 min) to 5:95 (2.6 min) to 95:5 (2.7 min) to 95:5(3.0 min), 0.9 ml/min 55° C.

[0523] B-1:
[0524] Column: Phenomenex Luna C18, 3.0 μm, 2.0×10 mm
[0525] Eluent: (H₂O+0.05% TFA)/ACN 93:7 (0 min) to 5:95 (1.20 min) to 5:95 ACN (1.40 min) to 93:7 (1.50 min); 1.1 ml/min, room temperature.

[0526] B-2:
[0527] Column: Phenomenex Luna C18, 3.0 μm, 2.0×10 mm
[0528] Eluent: (H₂O+0.05% TFA)/ACN 93:7 (0 min) to 5:95 (1.00 min) to 5:95 ACN (1.45 min) to 93:7 (1.50 min); 1.1 ml/min, room temperature.

[0529] B-3:
[0530] Column: Phenomenex Luna C18, 3.0 μm, 2.0×10 mm
[0531] Eluent: (H₂O+0.05% TFA)/ACN 20:80 (0 min) to 5:95 (0.60 min) to 5:95 ACN (1.45 min) to 80:20 (1.50 min); 1.1 ml/min, room temperature.

[0532] C:
[0533] Column: Waters ACQUITY UPLC BEH C18, 1.7 μm, 2.1×50 mm
[0534] Eluent: (H₂O+0.05% FA)/(ACN+0.035% FA) 98:2 (0 min) to 98:2 (0.2 min) to 2:98 (3.8 min) to 2:98 (4.3 min) to 98:2 (4.5 min), 1.0 ml/min, 55° C.

[0535] D:
[0536] Column: Chromolith@Flash RP-18E 2×25 mm
[0537] Eluent: (H₂O+0.0375% TFA)/(ACN+0.01875% TFA) 95:5 (0 min) to 5:95 (0.80 min) to 5:95 (1.20 min) to 95:5 (1.21 min) to 95:5 (1.55 min), 1.5 ml/min, 50° C.

[0538] E:
[0539] Column: Kinetex EVO C18E 2.1×30 mm, 5 μm
[0540] Eluent: (H₂O+0.0375% TFA)/(ACN+0.01875% TFA) 95:5 (0 min) to 5:95 (0.80 min) to 5:95 (1.20 min) to 95:5 (1.21 min) to 95:5 (1.55 min), 1.5 ml/min, 50° C.

[0541] Abbreviations Used:
[0542] AcOH: acetic acid
[0543] FA: formic acid
[0544] ACN: acetonitrile
[0545] DCM: dichloromethane
[0546] DMA: dimethylacetamide
[0547] DCE: dichloroethane
[0548] DMF: dimethylformamide
[0549] DMSO: dimethylsulfoxide
[0550] EtOAc: ethyl acetate
[0551] EtOH: ethanol
[0552] Et₂O: diethylether
[0553] iPrOH: isopropanol
[0554] THF: tetrahydrofuran
[0555] MeOH: methanol
[0556] NMP: N-methyl-2-pyrrolidone
[0557] PE: petrol ether
[0558] Pyr: pyridine
[0559] iPr: isopropyl
[0560] iBu: isobutyryl
[0561] cHex: cyclohexyl
[0562] MTB: methyl-tert.-butyl
[0563] DIPEA: diisopropylethylamine
[0564] DMAP: 4-(dimethylamino)-pyridine
[0565] DBU: 1,8-Diazabicyclo[5.4.0]undec-7-ene
[0566] HBTU: (2-(1H-Benzotriazol-1-yl)-1,1,3,3-tetramethyluronium-hexafluorophosphate)
[0567] TBTU: O-(Benzotriazol-1-yl)-N,N,N′,N′-tetramethyluronium tetrafluoroborate
[0568] DDTT: 3-((N,N-dimethyl-aminomethylidene)amino)-3H-1,2,4-dithiazole-5-thione
[0569] NEt₃: triethylamine
[0570] NEM: N-ethyl-morpholine
[0571] BSA: N,O-bis-trimethylsilyl acetamide
[0572] TMSOTf: trimethylsilyltrifluormethanesulfonate
[0573] Ts: p-toluenesulfonyl
[0574] Tf: trifluormethanesulfonyl
[0575] trifluoromethanesulfonate
[0576] TFA: trifluoroacetic acid
[0577] DCAA: dichloroacetic acid
[0578] TEA: triethylammonium
[0579] TIPS: triisopropylsilyl
[0580] TBDMS: tert-butyldimethylsilyl
[0581] DMT: 4,4′-dimethoxytrityl
[0582] Bzl: benzoyl
[0583] Bn: benzyl
[0584] BOM: benzyloxymethyl
[0585] Ac: acetyl
[0586] ⁱBu: isobutyryl
[0587] Boc: tert-butyloxycarbonyl
[0588] Fmoc: fluorenylmethyloxycarbonyl
[0589] Fmoc-OSu: N-(9-Fluorenylmethoxycarbonyloxy)succinimide
[0590] CE: cyanoethyl
[0591] CPG: controlled pore glass
[0592] T: thymine
[0593] U: uracile
[0594] C: cytosine
[0595] A: adenine
[0596] G: guanine
[0597] I: hypoxanthinehypoxanthine
[0598] T^{BOM}: N-benzyloxymethyl-thymine
[0599] U^{BOM}: N-benzyloxymethyl-uracile
[0600] U^{Bzl}: N-benzoyl-uracile
[0601] C^{Bzl}: N-benzoyl-cytosine
[0602] A^{Bzl}: N-benzoyl-adenine
[0603] G^{iBu}: N-isobutyryl-guanine
[0604] GalNAc: D-N-acetylgalactosamine
[0605] FR: flow rate
[0606] HPLC: high pressure liquid chromatography
[0607] MS-TOF: Mass spectrometry-time of flight
[0608] LC-MS: High-pressure liquid chromatography-Mass spectrometry
[0609] Rₜ: retention time
[0610] RT: room temperature
[0611] Hal: halogen
[0612] ELSD: evaporative light scattering detector
[0613] quant.: quantitative
[0614] sat.: saturated
[0615] i. vac.: in vacuum
[0616] n.d.: not determined
[0617] TLC: thin layer chromatography
[0618] h: hour
[0619] min: minutes
[0620] Tm: melting temperature
[0621] r: ribonucleotide
[0622] d: desoxy-ribonucleotide
[0623] m: 2′-OMe-nucleotide
[0624] f: 2′-desoxy-fluoro-nucleotide
[0625] ss: sense strand
[0626] as: antisense strand
[0627] ds: double strand
[0628] chol: cholesterol
[0629] PO: phosphodiester linkage
[0630] * or PS: phosphorothiate linkage
[0631] mpk: mg/kg
[0632] M: molar
[0633] #: number, n°
[0634] FBS: fetal bovine serum
[0635] ATP: adenosine-triphosphate
[0636] pre-lB: precursor nucleotide
[0637] pre-lgB: targeted precursor nucleotide
[0638] lB: nucleotide analog
[0639] lgB: targeted nucleotide analog

[0640] A: Synthesis of Nucleotide Analogs of Formula (I) Wherein X is NH, NR1, NC(═O)R1

[chemical structure]

### 1a: [(2S,3S,4R,5R)-4-acetoxy-3-benzyloxy-2-(benzyloxymethyl)-5-(5-methyl-2,4-dioxo-pyrimidin-1-yl)tetrahydrofuran-2-yl]methyl acetate

[0641] 42.5 g (87.4 mmol) of the starting material G3 and 22.3 g (174.7 mmol) thymine were dissolved in 500 ml dry ACN under an Ar-atmosphere. After adding 106.6 g (128.2 ml, 524.1 mmol) BSA, the solution was stirred for 1 h at 80° C. After cooling the solution to 50° C., 31.8 g (25.9 ml, 141.5 mmol) TMSOTf were added and heating was continued for 1 h at 80° C. The solvent was evaporated i.vac. and the residue was dissolved in EtOAc and washed with sat. NaHCO₃-solution, H₂O and sat. NaCl-solution. After drying with MgSO₄, the organic layer was evaporated and the crude product was purified by silica gel chromatography (10 to 100% ethyl acetat in n-heptane), yielding the desired thymidine derivative 1a as colourless foam (40.9 g, 84.7%).

[0642] LCMS-Method A:

[0643] UV-wavelength [nm]=220: Rₜt[min]=1.82

[0644] Ionization method: ES⁻: [M−H]⁻=551.3

[0645] 1H-NMR (CDCl₃, 400 MHz) δ[ppm]: 8.55 (s, 1 H) 7.51-7.17 (m, 12 H), 6.23 (d, J=5.27 Hz, 1 H), 5.44 (t, J=5.65 Hz, 1 H), 4.72-4.35 (m, 6 H), 4.19 (d, J=12.17 Hz, 1 H), 3.79 (d, J=10.16 Hz, 1 H), 3.53 (d, J=10.16 Hz, 1 H) 2.17-2.06 (m, 6 H), 1.55 (d, J=0.75 Hz, 3 H).

### 1b: [(2S,3S,4R,5R)-4-acetoxy-3-benzyloxy-2-(benzyloxymethyl)-5-(2,4-dioxopyrimidin-1-yl)-tetrahydrofuran-2-yl]methyl acetate

[0646] 10.0 g (20.55 mmol) of G3 and 3.49 g (30.8 mmol) uracile were dissolved 200 ml dry ACN. After adding 20.09 g (30.15 ml, 123.3 mmol) BSA, the solution was stirred at 81° C. for 1 h. After cooling the solution to 0° C., 7.48 g (6.10 ml, 33.3 mmol) TMSOTf were added and the mixture was heated to 65° C. Stirring was continued at this temperature for 1 h, when complete conversion was achieved. At room temperature, 500 ml sat. NaHCO₃-solution were added and the mixture was extracted with 500 ml EtOAc. The organic layer was separated and washed with H₂O and sat. NaCl-solution. After drying with MgSO₄, the crude product was purified on silicagel (20 to 100% EtOAc in n-heptane), which gave the protected nucleoside analog 1b in 82.3% yield (9.11 g) as colourless foam.

[0647] LCMS-Method A:

[0648] UV-wavelength [nm]=220: Rₜ[min]=1.82

[0649] Ionization method: ES⁺: [M+H]⁺=539.1

[0650] 1H-NMR (CDCl₃, 400 MHz) δ[ppm]: 8.97 (s, 1 H), 7.66 (d, J=8.0 Hz, 1 H), 7.38-7.35 (m, 10 H), 6.19 (d, J=4.0 Hz, 1 H), 5.38-5.30 (m, 2 H), 4.63 (d, J=12.0 Hz, 1 H), 4.46-4.41 (m, 5 H), 4.19 (d, J=12.0 Hz, 1 H), 3.79 (d, J=12.0 Hz, 1 H), 3.51 (d, J=12.0 Hz, 1 H), 2.12 (s, 3 H), 2.07 (s, 3 H).

### 1c: [(2S,3S,4R,5R)-4-acetoxy-3-benzyloxy-2-(benzyloxymethyl)-5-[2-(2-methylpropanoyl-amino)-6-oxo-1H-purin-9-yl]tetrahydrofuran-2-yl]methyl acetate

[0651] To a solution of compound G3 (148.5 g, 0.30 mol) in 6.68 l DCE was added N-isobutyryl-guanine (135 g, 0.61 mol) and BSA (311.85 ml, 1.2 mol) at 15° C. under N₂-atmosphere. The mixture was stirred at 85° C. for 3 h. Then TMSOTf (183.4 g, 0.90 mol) was added at 85° C. and stirring was continued for 3 h, when TLC showed complete conversion. The mixture was cooled to room temperature and poured into 6.5 l sat. NaHCO₃-solution. The organic layer was separated and the aqueous phase was extracted twice with 5 l DCM. The organic layers were combined and dried over anhydrous Na₂SO₄, filtered and concentrated. The obtained crude product was purified by preparative HPLC (0.1% TFA/ACN), yielding compound 1c (128 g, 64%) as a white solid.

[0652] 1H-NMR (DMSO-d6, 400 MHz) δ[ppm]: 12.09 (s,1 H), 11.62 (s, 1 H), 8.14 (s, 1 H), 7.41-7.30 (m, 10 H), 6.12 (d, J=6.4 Hz, 1 H), 5.90 (t, Ji=J₂=5.6 Hz, 1 H), 4.71 (d, J=5.2 Hz, 1 H), 4.63-4.55 (m, 4 H), 4.34 (d, J=5.6 Hz, 1 H), 4.23 (d, J=5.6 Hz, 1 H), 3.71-3.66 (m, 2 H), 3.18 (d, J=4.8 Hz, 1 H), 2.76-2.51 (m, 1 H), 2.05 (s, 3 H), 1.99 (s, 3 H), 1.20-1.12 (s, 6 H).

### 1d: [(2S,3S,4R,5R)-4-acetoxy-3-benzyloxy-2-(benzyloxymethyl)-5-(6-oxo-1H-purin-9-yl)-tetrahydrofuran-2-yl]methyl acetate

[0653] Starting with 10.0 g (20.55 mmol) G3 and 3.32 g (23.66 mmol) hypoxanthine as nucleobase, the title compound was synthesized following the protocol described for 1c. After silicagel purification (10 to 100% EtOAc/MeOH (9:1) in n-heptane), the title compound 1d was isolated as colourless foam (9.53 g, 81.1%).

[0654] LCMS-Method A:

[0655] UV-wavelength [nm]=220: Rₜ[min]=1.73

[0656] Ionization method: ES⁺: [M+H]⁺=563.3

[0657] 1H-NMR (DMSO-d6, 400 MHz) δ[ppm]: 12.42 (s, 1 H), 8.22 (s, 1 H), 8.01 (s, 1 H), 7.25-7.39 (m, 10 H), 6.21 (d, J=4.89 Hz, 1 H), 5.90-5.97 (m, 1 H), 4.78 (d, J=5.75 Hz, 1 H), 4.45-4.61 (m, 4 H), 4.32-4.41 (m, 1 H), 4.17-4.25 (m, 1 H), 3.59-3.74 (m, 2 H), 2.04 (m, 3 H), 1.98 (m, 3 H).

[0658] 1e: [(2S,3S,4R,5R)-4-acetoxy-5-(6-benzamidopurin-9-yl)-3-benzyloxy-2-(benzyloxymethyl)-tetrahydrofuran-2-yl]methyl acetate

[0659] To a mixture of compound G3 (164 g, 0.337 mol) and N-benzoyl adenine (121 g, 0.506 mol) in 6.56 l DCE was added BSA (274 g, 1.348 mol) dropwise at room temperature and the mixture was stirred at 90° C. for 1.5 h. After dropwise addition of TMSOTf (225 g, 1.011 mol) at 40-50° C., the mixture was stirred at 90° C. for 1 h. The mixture was quenched with 15 l sat. NaHCO₃-solution and the layers were separated. The aqueous layer was extracted 2× with 3 l EtOAc and the combined organic layers were dried over anhydrous Na₂SO₄, filtered and concentrated i.vac. The crude product was purified by flash chromatography (PE/EtOAc 1:2) to give compound 1e as an anomeric mixture (224.4 g) as yellow oil. The mixture was purified by two reverse flash chromatographies (neutral) to give pure compound 1e (75.5 g, 33.7%) as colourless foam.

[0660] 1H-NMR (DMSO-d6, 400 MHz) δ[ppm]: 11.25 (s, 1 H), 8.72 (s, 1 H), 8.62 (s, 1 H), 8.05 (d, J=7.40 Hz, 2 H), 7.71-7.62 (m, 1 H), 7.60-7.50 (m, 2 H), 7.43-7.21 (m, 10 H), 6.38 (d, J=4.77 Hz, 1 H), 6.12 (t, J=5.33 Hz, 1 H), 4.88 (d, J=5.77 Hz, 1 H), 4.63 (s, 2 H), 4.56-4.45 (m, 2 H), 4.41 (d, J=11.92 Hz, 1 H), 4.25 (d, J=11.80 Hz, 1 H), 3.75-3.59 (m, 2 H), 2.06 (s, 3 H), 2.00 (s, 3 H).

### 2a: 1-[(2R,3R,4S,5R)-4-benzyloxy-5-(benzyloxymethyl)-3-hydroxy-5-(hydroxymethyl)-tetra-hydrofuran-2-yl]-5-methyl-pyrimidine-2,4-dione

[0661] To a solution of 40.9 g (74.0 mmol) 1a in 500 ml THF/EtOH (4:1) were added 221.9 ml (443.8 mmol) of an aqueous NaOH-solution (2 M) at 0° C. After removing the ice bath, the mixture was stirred for 2 h to reach complete conversion. The solution was brought to neutral pH at 0° C. by adding a 2 N HCl-solution. The solvent was concentrated i.vac. and the remaining aqueous phase was extracted twice with 250 ml of DCM. The combined organic layers were dried with MgSO₄ and evaporated to yield 34.8 g (quant.) of the deprotected product 2a, which was used in the following step without further purification.

[0662] LCMS-Method A:

[0663] UV-wavelength [nm]=220: Rₜ[min]=1.64

[0664] Ionization method: ES⁺: [M+H]⁺=469.2

[0665] 1H-NMR (CDCl₃, 400 MHz) δ[ppm]: 9.24-8.77 (m, 1 H), 7.45 (br s, 1 H), 7.41-7.30 (m, 8 H), 7.27 (br d, J=7.78 Hz, 2 H), 6.04 (br d, J=4.02 Hz, 1 H), 4.86 (br d, J=11.67 Hz, 1 H), 4.63-4.51 (m, 3 H), 4.45-4.31 (m, 2 H), 4.31-3.96 (m, 1 H), 3.84 (br d, J=11.29 Hz, 1 H), 3.76-3.64 (m, 2 H), 3.58 (d, J=10.42 Hz, 1 H), 2.96-2.62 (m, 1 H), 1.63-1.51 (m, 3 H).

### 2b: 1-[(2R,3R,4S,5R)-4-benzyloxy-5-(benzyloxymethyl)-3-hydroxy-5-(hydroxymethyl)-tetra-hydrofuran-2-yl]pyrimidine-2,4-dione

[0666] 9.10 g (16.9 mmol) of 1b were dissolved in 240 ml THF/EtOH (3:1). At 0° C., 8.49 ml (84.5 mmol) of a 1 M NaOH solution were added and the solution was stirred, allowing to reach room temperature. After 1 h, citric acid was added until a pH of 7 was reached and the solvent was evaporated. The aqueous residue was extracted with EtOAc. The organic layer was separated and washed with sat. NaCl-solution. After drying with MgSO₄, the solvent was removed, yielding 7.66 g (99.7%) of the crude product as colourless foam, which was used without further purification.

[0667] LCMS-Method A:

[0668] UV-wavelength [nm]=220: Rₜ[min]=1.63

[0669] Ionization method: ES⁺: [M+H]⁺=455.1

[0670] 1H-NMR (DMSO-d6, 400 MHz) δ[ppm]: 11.29 (s, 1 H), 7.69 (d, J=8.2 Hz, 1 H), 7.27-7.41 (m, 10 H), 5.88 (d, J=5.7 Hz, 1 H), 5.57 (d, J=7.2 Hz, 1 H), 5.37 (d, J=8.1 Hz, 1 H), 4.98 (t, J=5.4 Hz, 1 H), 4.80 (d, J=11.7 Hz, 1 H), 4.46-4.58 (m, 3 H), 4.27-4.37 (m, 1 H), 4.00-4.14 (m, 1 H), 3.50-3.69 (m, 4 H).

### 2c: N-[9-[(2R,3R,4S,5R)-4-benzyloxy-5-(benzyloxymethyl)-3-hydroxy-5-(hydroxymethyl)-tetrahydrofuran-2-yl]-6-oxo-1H-purin-2-yl]-2-methyl-propanamide

[0671] To a solution of compound 1c (72 g, 0.11 mol) in 1.7 l THF/EtOH (4:1) was added dropwise a 1 M NaOH-solution (443 mL) at 0° C. The solution was stirred at 0° C. for 1 h to reach complete conversion. The pH was adjusted to 7 by adding 1 N HCl and the solvent was removed. The residue was dissolved in H₂O (500 mL) and extracted with 3×500 ml DCM. The organic layers were combined, dried over anhydrous Na₂SO₄ and concentrated to give compound 2c (113 g, quant.) as a colourless solid, which was used in the next step without further purification.

[0672] 1H-NMR (DMSO-d6, 400 MHz) δ[ppm]: 12.07(s,1 H), 11.66 (s, 1 H), 8.10 (s, 1 H), 7.42-7.30 (m, 10 H), 5.92 (d, J=6.8 Hz, 1 H) , 4.99 (s, 1 H) , 4.87-4.84 (m, 2 H), 4.63 (d, J=15.6 Hz, 1 H), 4.56 (s, 2 H), 4.24 (d, J=4.8 Hz, 1 H), 3.69-3.62 (m, 4 H), 2.76-2.73 (m, 1 H), 1.13-1.04 (m, 7 H).

### 2d: 9-[(2R,3R,4S,5R)-4-benzyloxy-5-(benzyloxymethyl)-3-hydroxy-5-(hydroxymethyl)-tetra-hydrofuran-2-yl]-1H-purin-6-one

[0673] Following the procedure described for 2b, 9.34 g (16.65 mmol) 1d were deprotected to yield 7.76 g (97.4%) of the title compound 2d as crude product, which was used without additional purification.

[0674] LCMS-Method A:

[0675] UV-wavelength [nm]=220: Rₜ[min]=1.53

[0676] Ionization method: ES⁺: [M+H]⁺=479.3

[0677] 1H-NMR (DMSO-d6, 400 MHz) δ[ppm]: 8.16 (s, 1 H), 7.97-8.04 (m, 1 H), 7.27-7.41 (m, 10 H), 5.97 (d, J=5.75 Hz, 1 H), 5.75 (s, 1 H), 5.03 (br s, 1 H), 4.79-4.92 (m, 2 H), 4.47-4.62 (m, 3 H), 4.24-4.34 (m, 1 H), 3.55-3.70 (m, 4 H).

### 2e: N-[9-[(2R,3R,4S,5R)-4-benzyloxy-5-(benzyloxymethyl)-3-hydroxy-5-(hydroxymethyl)-tetrahydrofuran-2-yl]purin-6-yl]benzamide

[0678] Following the procedure described for 2b, 144 g (216 mmol) 1e were deprotected to yield 126 g (quant., crude) of the title compound 2e as colourless foam, which was used without additional purification.

[0679] 1H-NMR (DMSO-d6, 400 MHz) δ[ppm]: 11.23 (s, 1 H), 8.73 (s, 1 H), 8.59 (s, 1 H), 8.05 (br d, J=7.46 Hz, 2 H), 7.71-7.63 (m, 1 H), 7.61-7.52 (m, 2 H), 7.49-7.23 (m, 10 H), 6.16 (d, J=5.75 Hz, 1 H), 5.85 (d, J=7.46 Hz, 1 H), 5.14-4.99 (m, 2 H), 4.86 (d, J=11.86 Hz, 1 H), 4.63 (d, J=11.74 Hz, 1 H), 4.53 (s, 2 H), 4.38 (d, J=5.14 Hz, 1 H), 3.79-3.57 (m, 4 H).

### 3a: 1-[(2R,3R,4S,5S)-4-benzyloxy-5-(benzyloxymethyl)-3-hydroxy-5-(triisopropylsilyloxy-methyl)tetrahydrofuran-2-yl]-5-methyl-pyrimidine-2,4-dione

[0680] 34.7 g (74.2 mmol) of the starting compound 2a and 16.8 g (244.7 mmol) imidazole were dissolved in 300 ml dry DCM. At room temperature, a solution of 16.2 g (18.0 ml, 81.6 mmol) TIPS-chloride in 200 ml DCM was added and the reaction was stirred for 19 h. After quenching with EtOH, the solvent was evaporated and the residue was dissolved in EtOAc. The organic solution was washed with H₂O, 1 M HCl, H₂O and sat. NaHCO₃-solution, followed by sat. NaCl-solution. After drying with MgSO₄, the solvent was removed and the crude product (47.1 g) was purified by silicgel chromatography (10 to 100% EtOAc in n-heptane), which gave the desired TIPS-protected product 3a as colourless foam (37.5 g, 80.9%).

[0681] LCMS-Method A:

[0682] UV-wavelength [nm]=220: Rₜ[min]=2.22

[0683] Ionization method: ES⁺: [M+H]⁺=625.3

[0684] 1H-NMR (CDCl₃, 400 MHz) δ[ppm]: 8.52 (s, 1 H), 7.35-7.13 (m, 11 H), 5.88 (d, J=3.89 Hz, 1 H), 4.72-4.63 (m, 1 H), 4.60-4.51 (m, 1 H), 4.46 (s, 2 H), 4.34-4.26 (m, 1 H), 4.22 (d, J=6.27 Hz, 1 H), 3.90 (d, J=10.92 Hz, 1 H), 3.77 (d, J=1.00 Hz, 2 H), 3.63-3.51 (m, 2 H), 1.52 (d, J=0.88 Hz, 3 H), 1.12-0.90 (m, 21 H).

### 3b: 1-[(2R,3R,4S,5S)-4-benzyloxy-5-(benzyloxymethyl)-3-hydroxy-5-(triisopropylsilyloxy-methyl)tetrahydrofuran-2-yl]pyrimidine-2,4-dione

[0685] Starting with 7.66 g (16.8 mmol) of 2b, the title compound was prepared as described in the protocol for 3a, yielding 8.69 g (84.5%) of the desired silylated product 3b after silicagel chromatography (20 to 80% EtOAc in n-heptane).

[0686] LCMS-Method A:

[0687] UV-wavelength [nm]=220: Rₜ[min]=2.23

[0688] Ionization method: ES⁺: [M+H]⁺=611.2

[0689] 1H-NMR (CDCl₃, 400 MHz) δ[ppm]: 9.04 (s, 1 H), 7.63 (d, J=8.0 Hz, 1 H), 7.37-7.34 (m, 8 H), 7.26-7.24 (m, 2 H), 5.96 (d, J=4.0 Hz, 1 H), 5.37 (d, J=8.0 Hz, 1 H), 4.77 (d, J=12.0 Hz, 1 H), 4.62 (d, J=12.0 Hz, 1 H), 4.49 (s, 2 H), 4.26 (d, J=8.0 Hz, 1 H), 3.83 (dd, J=8.0, 10.0 Hz, 2 H), 3.63 (dd, J=8.0, 10.0 Hz, 2 H), 1.15-1.04 (m, 21 H).

### 3c: N-[9-[(2R,3R,4S,5S)-4-benzyloxy-5-(benzyloxymethyl)-3-hydroxy-5-(triisopropylsilyloxy-methyl)tetrahydrofuran-2-yl]-6-oxo-1H-purin-2-yl]-2-methyl-propanamide

[0690] To a solution of compound 2c (75 g, 133 mmol) in anhydrous DCM (1568 ml) was added imidazole (38 g, 559 mmol) and TIPSCl (35.9 g, 186 mmol) at 0° C. under N₂-atmosphere. After stirring for 12 h at 10 to 15° C., the solution was poured into ice-water (2 l) and extracted with DCM (3×1.5 l). The organic layers were combined and washed with brine (1 l), dried over anhydrous Na₂SO₄, filtered and concentrated. The residue was purified by column chromatography on silica gel (PE/EtOAc 2:1 to EtOAc), yielding 65 g (68%) of the title compound 3c as a white foam.

[0691] 1H-NMR (DMSO-d6, 400 MHz) δ[ppm]: 12.07 (s,1 H), 11.61 (s, 1 H), 8.14 (s, 1 H), 7.37-7.22 (m, 10 H), 5.89 (d, J=6.8 Hz, 1 H), 5.72 (d, J=5.6 Hz, 1 H) , 4.94-4.93 (m, 2 H) , 4.90-4.53 (m, 3 H), 4.19 (d, J=4.4 Hz, 1 H), 3.92-3.88 (m, 2 H), 3.85-3.71 (m, 2 H), 2.78-2.71 (m, 1 H), 1.13-1.05 (m, 6 H), 1.00-0.94 (m, 21 H).

### 3d: 9-[(2R,3R,4S,5S)-4-benzyloxy-5-(benzyloxymethyl)-3-hydroxy-5-(triisopropylsilyloxy-methyl)tetrahydrofuran-2-yl]-1H-purin-6-one

[0692] Starting with 7.75 g (16.2 mmol) of 2d, the title compound was prepared as described in the protocol for 3a, yielding 8.60 g (83.6%) of the desired silylated product 3d after silicagel chromatography (0 to 100% EtOAc/MeOH (9:1) in n-heptane).

[0693] LCMS-Method A:

[0694] UV-wavelength [nm]=220: Rₜ[min]=2.19

[0695] Ionization method: ES⁺: [M+H]⁺=635.5

[0696] 1H-NMR (DMSO-d6, 400 MHz) δ[ppm]: 12.38 (br s, 1 H), 8.22 (s, 1 H), 8.03 (s, 1 H), 7.26-7.39 (m, 10 H), 5.94 (d, J=6.85 Hz, 1 H), 5.67 (d, J=6.48 Hz, 1 H), 4.98-4.74 (m, 2 H), 4.61-4.48 (m, 3 H), 4.24 (d, J=4.89 Hz, 1 H), 3.97-3.82 (m, 2 H), 3.69 (s, 2 H), 0.80-1.18 (m, 21 H).

### 3e: N-[9-[(2R,3R,4S,5S)-4-benzyloxy-5-(benzyloxymethyl)-3-hydroxy-5-(triisopropylsilyloxy-methyl)tetrahydrofuran-2-yl]purin-6-yl]benzamide

[0697] To a mixture of compound 2e (135 g, 0.232 mol) and imidazole (47.4 g, 0.696 mol) in 1.35 l DCM was added a solution of TIPSCl (80.6 g, 0.418 mol) in 1.35 l DCM at room temperature. The mixture was stirred for 24 h. After quenching with 400 ml of EtOH, the mixture was washed with 1.5 l water. The aqueous layer was extracted twice with 1 l EtOAc and the combined organic layers were dried over anhydrous Na₂SO₄, filtered and concentrated i.vac. The crude product was purified by flash chromatography (PE/EtOAc 2:1) to yield the silylether 3e (145 g, 84.8%) as white foam.

[0698] 1H-NMR (DMSO-d6, 400 MHz) δ[ppm]: 11.23 (s, 1 H), 8.74 (s, 1 H), 8.63 (s, 1 H), 8.06 (d, J=7.28 Hz, 2 H), 7.71-7.62 (m, 1 H), 7.60-7.51 (m, 2 H), 7.44-7.23 (m, 10 H), 6.13 (d, J=6.78 Hz, 1 H), 5.77 (d, J=6.40 Hz, 1 H), 5.21-5.10 (m, 1 H), 4.94 (d, J=11.92 Hz, 1 H), 4.66-4.50 (m, 3 H), 4.30 (d, J=4.77 Hz, 1 H), 4.00-3.86 (m, 2 H), 3.74 (s, 2 H), 1.11-0.89 (m, 21 H).

### 4a: 1-[(2R,3R,4S,5S)-3,4-dihydroxy-5-(hydroxymethyl)-5-(triisopropylsilyloxymethyl)-tetra-hydrofuran-2-yl]-5-methyl-pyrimidine-2,4-dione

[0699] In an autoclave, a solution of 13.4 g (21.4 mmol) of the bis-benzyl ether 3a in 100 ml EtOH was degassed and purged with argon. After adding a catalytical amount of Pd(OH)₂ (20% on carbon), the solution was set under H₂-atmosphere of 4 bar for 1 h. The Pd-catalyst was filtered off and the filtrate was evaporated, which gave 9.74 g (quant.) of the desired debenzylated product as colourless foam.

[0700] LCMS-Method A:

[0701] UV-wavelength [nm]=220: Rₜ[min]=1.84

[0702] Ionization method: ES⁺: [M+H]⁺=445.3

[0703] 1H-NMR (CDCl₃, 400 MHz) δ[ppm]: 8.85 (s, 1 H), 7.25 (d, J=1.00 Hz, 1 H), 5.58 (d, J=6.15 Hz, 1 H), 4.71-4.61 (m, 1 H), 4.51-4.44 (m, 1 H), 4.02-3.95 (m, 1 H), 3.94-3.89 (m, 1 H), 3.88-3.77 (m, 3 H), 3.76-3.67 (m, 1 H), 3.22 (br dd, J=6.71, 3.83 Hz, 1 H), 1.93 (d, J=1.00 Hz, 3 H), 1.00-1.24 (m, 21 H).

### 4b: 1-[(2R,3R,4S,5S)-3,4-dihydroxy-5-(hydroxymethyl)-5-(triisopropylsilyloxymethyl)-tetra-hydrofuran-2-yl]pyrimidine-2,4-dione

[0704] Starting with 8.69 g (14.2 mmol) of 3b, the title compound was prepared as described in the protocol for 4a, yielding 6.21 g (quant., crude) of the desired product 4b, which was used without purification.

[0705] LCMS-Method A:

[0706] UV-wavelength [nm]=220: Rₜ[min]=1.78

[0707] Ionization method: ES⁺: [M+H]⁺=431.1

[0708] 1H-NMR (DMSO-d6, 400 MHz) δ[ppm]: 11.29 (s, 1 H), 7.91 (d, J=8.0 Hz, 1 H), 5.87 (d, J=8.0 Hz, 1 H), 5.69 (d, J=8.0 Hz, 1 H), 5.28 (d, J=8.0 Hz, 1 H), 5.12 (t, J=4.0 Hz, 1 H), 5.00 (d, J=4.0 Hz, 1 H), 4.19 (dd, J=8.0, 12.0 Hz, 1 H), 4.05 (t, J=4.0 Hz, 2 H), 3.81 (dd, J=8.0, 12.0 Hz, 2 H), 3.62 (d, J=4.0 Hz, 2 H), 1.05-1.00 (m, 21 H).

### 4c: N-[9-[(2R,3R,4S,5S)-3,4-dihydroxy-5-(hydroxymethyl)-5-(triisopropylsilyloxymethyl)-tetrahydrofuran-2-yl]-6-oxo-1H-purin-2-yl]-2-methyl-propanamide

[0709] To a solution of compound 3c (95 g, 0.132 mol) in anhydrous DCM (300 mL) was added BCl₃ (921mL) at −70° C. under N₂-atmosphere. The reaction solution was stirred between −75 and −60° C. for 2 h, when full conversion was detected by TLC. To the mixture were added approx. 200 ml of a saturated solution of NH₃ in MeOH. The pH was adjusted to 10-11 and the solvents were removed under reduced pressure. The crude product was purified by column chromatography on silica gel (PE/EtOAc 20:1 to 4:1), yielding the debenzylated product 4c (51 g, yield, 71.6%) as a yellow solid.

[0710] 1H-NMR (DMSO-d6, 400 MHz) δ[ppm]: 11.86 (s, 2 H), 8.27 (s, 1 H), 5.83 (d, J=7.2 Hz, 1 H), 5.42 (s, 1 H), 5.06 (s, 2 H), 4.64 (s, 1 H) , 4.17 (d, J=4.0 Hz, 1 H), 3.89 (d, J=10.8 Hz, 1 H), 3.79 (d, J=10.4 Hz, 1 H), 3.67 (s, 2 H), 2.80-2.73 (m, 1 H),1.17-1.08 (m, 6 H), 1.02-0.92 (m, 21 H).

### 4d: 9-[(2R,3R,4S,5S)-3,4-dihydroxy-5-(hydroxymethyl)-5-(triisopropylsilyloxymethyl)-tetra-hydrofuran-2-yl]-1H-purin-6-one

[0711] 8.59 g (13.53 mmol) of the starting compound 3d were dissolved in 200 ml DCM. After cooling to −70 to −50° C., 74.4 ml (74.4 mmol) of a 1 M solution of BCl₃ in toluene were added over a period of 15 min. After stirring for additional 15 min at −70° C., the cooling bath was removed and stirring was continued for another 30 min at room temperature. The reaction solution was then added dropwise into 180 ml of a 7 M solution of NH3 in MeOH. After stirring for 20 min, the mixture was evaporated and the residue dissolved 100 ml of DCM/iPrOH (4:1). After washing with sat. NaHCO₃-solution, the layers were separated and the aqueous layer was extracted 3× with DCM/iPrOH (4:1). The combined organic layers were dried with MgSO₄, filtered and evaporated. The crude product was purified by silicagel chromatoraphy (0 to 10% MeOH in DCM) yielding 4.14 g (67.3%) of the title compound 4d as colourless foam.

[0712] LCMS-Method A:

[0713] UV-wavelength [nm]=220: Rₜ[min]=1.74

[0714] Ionization method: ES⁻: [M−H]⁻=453.4

[0715] 1H-NMR (DMSO-d6, 400 MHz) δ[ppm]: 12.38 (m, 1 H), 8.33 (s, 1 H), 8.07 (s, 1 H), 5.87 (d, J=7.34 Hz, 1 H), 5.37 (d, J=6.97 Hz, 1 H), 5.01-5.14 (m, 2 H), 4.64-4.76 (m, 1 H), 4.15-4.20 (m, 1 H), 3.81-3.93 (m, 2 H), 3.65 (d, J=5.14 Hz, 2 H), 0.94-1.14 (m, 21 H).

### 4e: N-[9-[(2R,3R,4S,5S)-3,4-dihydroxy-5-(hydroxymethyl)-5-(triisopropylsilyloxymethyl)-tetrahydrofuran-2-yl]purin-6-yl]benzamide

[0716] To a solution of compound 3e (31 g, 42.0 mmol) in 620 ml DCM was added BCl₃ (252 mL, 0.252 mol) dropwise at −70° C. The mixture was stirred at −70° C. under N₂ for 30 min and warmed to 15° C. After stirring for another 30 min at this temperature, the reaction mixture was poured carefully into 600 ml 7 M NH₃ in MeOH, while keeping the temperature below −20° C. After evaporation, the residue was dissolved in 31 DCM/iPrOH (4:1) and washed with 11 water and sat. NaHCO₃-solution. The combined aqueous layers were extracted with 2×1 l DCM/iPrOH (4:1) and the combined organic layers were dried over anhydrous Na₂SO₄, filtered and concentrated i. vac. The residue was purified by flash chromatography (PE/EtOAc 1:4) to give compound 4e (16.9 g, yield 72.2%) as white solid.

[0717] 1H-NMR (DMSO-d6, 400 MHz) δ[ppm]: 11.23 (s, 1 H), 8.77 (s, 1 H), 8.72 (s, 1 H), 8.06 (d, J=7.28 Hz, 2 H), 7.70-7.61 (m, 1 H), 7.60-7.51 (m, 2 H), 6.06 (d, J=7.53 Hz, 1 H), 5.48 (d, J=6.90 Hz, 1 H), 5.22-5.11(m, 2 H), 4.93-4.83 (m, 1 H), 4.24 (t, J=4.77 Hz, 1 H), 3.92 (q, J=10.67 Hz, 2 H), 3.78-3.62 (m, 2 H), 1.14-1.01 (m, 21 H).

### 5a: 1-[(2R,6S)-3,5-dihydroxy-6-(hydroxymethyl)-6-(triisopropylsilyloxymethyl)-1,4-dioxan-2-yl]-5-methyl-pyrimidine-2,4-dione

[0718] 2.93 g (6.6 mmol) of the starting material 4a were dissolved in 120 ml acetone/H₂O (4:1). A solution of 1.69 g (7.9 mmol) NaIO₄ in 50 ml H₂O was added and the mixture was stirred at room temperature for 1 h. The precipitate was filtered off and the filtrate was concentrated i.vac. The remaining aqueous solution was extracted with 200 ml EtOAc. After washing the organic layer with H₂O and sat. NaCl-solution, it was dried with MgSO₄ and the solvent was removed under reduced pressure, which gave 2.86 g (94.1%) of the desired product as colourless solid, which was used without further purification.

[0719] LCMS-Method B-1:

[0720] UV-wavelength [nm]=220: Rₜ[min]=1.04

[0721] Ionization method: ES⁺: [M+H−H₂O]⁺=443.2

### 5b: 1-[(2R,6S)-3,5-dihydroxy-6-(hydroxymethyl)-6-(triisopropylsilyloxymethyl)-1,4-dioxan-2-yl]pyrimidine-2,4-dione

[0722] Starting with 6.21 g (14.4 mmol) 4b, the title compound was made following the protocol decribed in 4a, which gave 6.38 g (99%) of the desired product 5b as crude product, which was used without additional purification.

[0723] LCMS-Method B-1:

[0724] UV-wavelength [nm]=220: Rₜ[min]=1.00

[0725] Ionization method: ES⁺: [M+H−H₂O]⁺=429.5

### 5c: N-[9-[(2R,6S)-3,5-dihydroxy-6-(hydroxymethyl)-6-(triisopropylsilyloxymethyl)-1,4-dioxan-2-yl]-6-oxo-1H-purin-2-yl]-2-methyl-propanamide

[0726] To a solution of compound 4c (25 g, 46 mmol) in a mixed solvent of acetone (485 ml) and water (145 ml) was added a solution of NaIO₄ (13.9 g, 65 mmol) in water (150 ml) at 25° C. and the mixture was stirred for 12 h. After the solvents were evaporated i. vac., the residue was dissolved in EtOAc (500 ml) and washed with sat. NaHCO₃-solution (500 ml) and brine (500 ml). The organic layer was dried with Na₂SO₄, filtered and concentrated in vacuo to give crude 5c (25.7 g, quant.) as a white solid, which was used without further purification.

[0727] 1H-NMR (DMSO-d6, 400 MHz) δ[ppm]: 12.05 (br s, 1 H), 11.79 (s, 1 H), 8.17 (s, 1 H), 7.52 (d, J=5.62 Hz, 1 H), 6.23 (s, 1 H), 5.34 (d, J=5.62 Hz, 1 H), 5.23 (s, 1 H), 4.46 (d, J=9.54 Hz, 1 H), 4.15-4.04 (m, 1 H), 3.93 (d, J=9.78 Hz, 1 H), 3.85 (d, J=10.03 Hz, 1 H), 3.71 (d, J=10.03 Hz, 1 H), 2.85-2.66 (m, 1 H), 1.12 (d, J=6.85 Hz, 6 H), 1.07-0.95 (m, 21 H).

### 5d: 9-[(2R,6S)-3,5-dihydroxy-6-(hydroxymethyl)-6-(triisopropylsilyloxymethyl)-1,4-dioxan-2-yl]-1H-purin-6-one

[0728] 4.14 g (9.1 mmol) of the starting material 4d were dissolved in 120 ml acetone/H₂O (4:1). A solution of 2.63 g (12.3 mmol) NaIO₄ in 50 ml H₂O was added and the mixture was stirred at room temperature for 18 h. The precipitate was filtered off and the filtrate was concentrated i.vac. To the remaining aqueous solution were added 100 ml sat. NaHCO₃-solution and the aqueous layer was extracted twice with 100 ml DCM/iPrOH (4:1). The organic layers were dried with MgSO₄ and the solvent was removed under reduced pressure, which gave 4.27 g (99.7%) of the desired product 5d as colourless foam, which was used without further purification.

[0729] LCMS-Method A:

[0730] UV-wavelength [nm]=220: Rₜ[min]=1.82

[0731] Ionization method: ES⁺: [M+H−H₂O]⁺=453.3

### 6a: 1-[(2R,6S)-6-(hydroxymethyl)-6-(triisopropylsilyloxymethyl)morpholin-2-yl]-5-methyl-pyrimidine-2,4-dione

[0732] To a solution of compound 5a (31 g, 67 mmol) in anhydrous MeOH (527 ml) was added (NH₄)₂B₂O₇.4H₂O (19.5 g, 74 mmol) at room temperature under N₂-atmosphere. The mixture was stirred for 2 h, followed by the addition of AcOH (8.08 g, 134 mmol), 4 Å molecular sieves (62 g) and NaBH₃CN (8.44 g, 134 mmol). The mixture was stirred at room temperature for 12 h under N₂-atmosphere until TLC showed complete consumption of the starting material. The solvent was removed in vacuo and the residue was dissolved in water (200 ml) and extracted with DCM (3×200 ml). The combined organic layers were dried with Na₂SO₄ and concentrated in vacuo. The residue was purified by column chromatography on silica gel (DCM/MeOH 50:1 to 10:1) yielding compound 6a (19.5 g, 67%) as a colourless solid.

[0733] 1H-NMR (DMSO-d6, 400 MHz) δ[ppm]: 11.27 (br s, 1 H), 7.71-7.52 (m, 1 H), 5.90-5.68 (m, 1 H), 4.68-4.46 (m, 1 H), 4.05-3.83 (m, 2 H), 3.40 (br d, J=5.38 Hz, 2 H), 2.83 (br d, J=9.78 Hz, 1 H), 2.79-2.72 (m, 1 H), 2.66 (br d, J=12.96 Hz, 2 H),1.79 (s, 3 H), 1.22-0.83 (m, 23 H).

### 6c: N-[9-[(2R,6S)-6-(hydroxymethyl)-6-(triisopropylsilyloxymethyl)morpholin-2-yl]-6-oxo-1H-purin-2-yl]-2-methyl-propanamide

[0734] Starting with 25.7 g (46.4 mmol) of compound 5c, the title compound was synthesized following the protocol described for 6a, yielding the desired morpholine 6c as colourless solid (7.5 g, 30.6%).

[0735] 1H-NMR (DMSO-d6, 400 MHz) δ[ppm]: 11.56 (br s, 1 H), 8.13-8.25 (m, 1 H), 5.67-5.81 (m, 2 H), 4.56 (br s, 1 H), 4.08 (br d, J=9.54 Hz, 1 H), 3.83 (br d, J=9.29 Hz, 1 H), 3.39-3.48 (m, 2 H), 3.10 (br d, J=9.54 Hz, 1 H), 2.65-2.93 (m, 4 H), 1.12 (br d, J=6.60 Hz, 7 H), 0.96-1.07 (m, 21 H).

### 7a: 1-[(2R,6S)-6-(hydroxymethyl)-4-isopropyl-6-(triisopropylsilyloxymethyl)morpholin-2-yl]-5-methyl-pyrimidine-2,4-dione (from 6a)

[0736] To a solution of compound 6a (19.5 g, 45.7 mmol) in anhydrous MeOH (390 ml) was added 4 Å molecular sieves (39 g), acetone (13.25 g, 228 mmol) and NaBH₃CN (14.4 g, 228 mmol) at room temperature under N₂-atmosphere. After stirring for 2 h, the mixture was adjusted to pH=5 to 6 with AcOH (about 2.0 ml), and stirring was continued for 12 h, when complete consumption of the starting material was detected by TLC. The solvent was removed in vacuo and the residue was dissolved in water (500 ml). After extraction with DCM (3×500 ml), the organic layers were combined, dried over Na₂SO₄ and concentrated in vacuo. After purification by silicagel chromatography (DCM/MeOH 50:1 to 10:1) the title compound 7a was obtained as colourless solid (17 g, 81%).

### 7a: 1-[(2R,6S)-6-(hydroxymethyl)-4-isopropyl-6-(triisopropylsilyloxymethyl)morpholin-2-yl]-5-methyl-pyrimidine-2,4-dione (from 5a)

[0737] 2.85 g (6.2 mmol) of the starting compound 5a, 1.26 g (1.74 ml, 12.4 mmol) NEt₃, 3.73 g (3.56 ml, 61.9 mmol) AcOH and 924 mg (1.34 ml, 15.5 mmol) isopropylamine were dissloved in 60 ml dry MeOH. At room temperature, 1.64 g (24.8 mmol) sodium cyanoboronhydride were added and the solution was stirred for 2 h at 60° C. After cooling down to room temperature, the reaction mixture was poured into 100 ml sat. NaHCO₃-solution and the solvent was concentrated under reduced pressure. The remaining aqueous phase was extracted with EtOAc, which was washed with sat. NaHCO₃-solution and sat. NaCl-solution. After drying with MgSO₄, the solvent was evaporated and the crude product (3.0 g) was purified by silicagel chromatography (10 to 80% ethyl acteate in n-heptane), yielding 1.76 g (60.7%) of the desired morpholine 7a as colourless solid.

[0738] LCMS-Method A:

[0739] UV-wavelength [nm]=220: Rₜ[min]=1.80

[0740] Ionization method: ES⁺: [M+H]⁺=470.2

[0741] 1H-NMR (DMSO-d6, 400 MHz) δ[ppm]: 11.30 (s, 1 H), 7.63 (s, 1 H), 5.77 (dd, J=10.42, 2.89 Hz, 1 H), 4.61 (t, J=5.90 Hz, 1 H), 4.00 (d, J=9.29 Hz, 1 H), 3.74 (d, J=9.03 Hz, 1 H), 3.53-3.41 (m, 2 H), 2.83-2.63 (m, 3 H), 2.26 (br d, J=11.29 Hz, 1 H), 2.21-2.07 (m, 1 H), 1.80 (s, 3 H), 1.14-1.00 (m, 21 H), 0.97 (d, J=6.53 Hz, 6 H).

### 7b: 1-[(2R,6S)-6-(hydroxymethyl)-4-isopropyl-6-(triisopropylsilyloxymethyl)morpholin-2-yl]-pyrimidine-2,4-dione (from 5b)

[0742] To a solution of 5b (6.38 g, 14.3 mmol) in 150 ml MeOH were added 8.62 g (8.23 ml, 142.8 mmol) AcOH, 2.90 g (3.98 ml, 28.6 mmol) NEt₃ and 2.13 g (3.09 ml, 35.7 mmol) isopropylamine at room temperature. After 1 h, 3.78 g (57.1 mmol) sodium cyanoboronhydride were added and stirring was continued for 1 h at room temperature followed by one additional hour at 65° C. The mixture was cooled to room temperature and 150 ml sat. NaHCO₃-solution were added and the MeOH was evaporated in vacuo. The aqueous solution was extracted with 350 ml EtOAc and the organic layer was washed with sat. NaHCO₃- and sat. NaCl-solution. After drying with MgSO₄, the solvent was removed and the crude product was purified by silicagel chromatography (0 to 5% MeOH in DCM), which gave 3.18 g (48.9%) of the title compound 7b as colourless solid.

[0743] LCMS-Method A:

[0744] UV-wavelength [nm]=220: Rₜ[min]=1.76

[0745] Ionization method: ES⁺: [M+H]⁺=456.4

[0746] 1H-NMR (DMSO-d6, 400 MHz) δ[ppm]: 11.32 (b s, 1 H), 7.77 (d, J=8.07 Hz, 1 H), 5.75 (dd, J=9.90, 2.81 Hz, 1 H), 5.61 (d, J=8.07 Hz, 1 H), 4.62 (t, J=5.93 Hz, 1 H), 3.99 (d, J=9.29 Hz, 1 H), 3.74 (d, J=9.17 Hz, 1 H), 3.45 (dd, J=10.33, 6.05 Hz, 2 H), 2.82 (br d, J=10.27 Hz, 1 H), 2.64-2.77 (m, 2 H), 2.24 (d, J=11.37 Hz, 1 H), 2.03-2.13 (m, 1 H), 1.00-1.10 (m, 21 H), 0.96 (m, 6 H).

### 7c: N-[9-[(2R,6S)-6-(hydroxymethyl)-4-isopropyl-6-(triisopropylsilyloxymethyl)morpholin-2-yl]-6-oxo-1H-purin-2-yl]-2-methyl-propanamide (from 6c)

[0747] Starting with 7.5 g (14.0 mmol) 6c, the title compound was synthesized following the protocol described for 7a (from 6a). After final purification on silicagel (PE/EtOAc 4:1 to 1:1), 7c was isolated as colourless solid (5.13 g, 63%).

[0748] 1H-NMR (DMSO-d6, 400 MHz) δ[ppm]: 12.09 (s, 1 H), 11.56 (s, 1 H), 8.22 (s, 1 H), 5.80 (dd, J=9.79, 2.76 Hz, 1 H), 4.60 (t, J=6.27 Hz, 1 H), 4.09 (d, J=8.78 Hz, 1 H), 3.71 (d, J=8.78 Hz, 1 H), 3.48 (d, J=6.27 Hz, 2 H), 2.98 (br d, J=10.04 Hz, 1 H), 2.89-2.65 (m, 3 H), 2.43 (t, J=10.42 Hz, 1 H), 2.34 (d, J=11.29 Hz, 1 H), 1.13 (d, J=6.78 Hz, 6 H), 1.08-1.01 (m, 21 H), 0.99 (d, J=6.27 Hz, 6 H).

### 7d: 9-[(2R,6S)-6-(hydroxymethyl)-4-isopropyl-6-(triisopropylsilyloxymethyl)morpholin-2-yl]-1H-purin-6-one (from 5d)

[0749] 4.27 g (9.1 mmol) of the starting compound 5d were dissolved in 100 ml MeOH. After adding 1.84 g (2.53 ml, 18.1 mmol) NEt₃, 5.44 g (5.19 ml, 90.6 mmol) AcOH and 808 mg (1.17 ml, 13.6 mmol) isopropyl amine, the solution was stirred for 1 h at room temperature. 1.80 g (27.2 mmol) sodium cyanoboronhydride were added and the reaction was stirred at room temperature for 30 min and another 30 min at 60° C., when complete conversion was detected. To the reaction mixture 100 ml of sat. NaHCO₃-solution were added and the MeOH was evaporated. The remaining aqueous phase was extracted with 250 ml EtOAc. The organic layer was washed with sat. NaHCO₃- and NaCl-solution, dried with MgSO₄ and evaporated. The crude product was purified by silicagel chromatography (0 to 5% MeOH in DCM), yielding the title compound 7d as colourless solid (2.68 g, 61.7%).

[0750] LCMS-Method A:

[0751] UV-wavelength [nm]=220: Rₜ[min]=1.80

[0752] Ionization method: ES⁺: [M+H]⁺=480.4

[0753] 1H-NMR (DMSO-d6, 400 MHz) δ[ppm]: 12.35 (br s, 1 H), 8.31 (s, 1 H), 8.06 (s, 1 H), 5.91 (dd, J=9.90, 2.81 Hz, 1 H), 4.57 (t, J=6.05 Hz, 1 H), 4.11 (d, J=9.05 Hz, 1 H), 3.77 (d, J=9.05 Hz, 1 H), 3.40-3.50 (m, 2 H), 2.94-3.02 (m, 1 H), 2.67-2.87 (m, 2 H), 2.54-2.63 (m, 1 H), 2.33 (d, J=11.37 Hz, 1 H), 0.97-1.11 (m, 27 H).

[chemical structure]

### 1g: [(2S,3S,4R,5R)-4-acetoxy-3-benzyloxy-2-(benzyloxymethyl)-5-(6-chloropurin-9-yl)tetrahydrofuran-2-yl]methyl acetate

[0754] 12.60 g (25.9 mmol) of the carbohydrate building block G3 and 6.19 g (38.9 mmol) 6-chloropurine were dissolved in 175 ml dry ACN. Under an Ar-atmosphere, 12.07 g (11.84 ml, 77.7 mmol) DBU and 23.26 g (18.99 ml, 103.6 mmol) TMSOTf were added at 0° C. The ice bath was removed and the reaction was stirred for 1 h at room temperature and another h at 80° C., when complete conversion was detected. The solution was cooled to room temperature and poured into 500 ml sat. NaHCO₃-solution. After vigorous stirring for 1 h, the aqueous solution was extracted with 300 ml EtOAc. The organic layer was separated and washed with sat. NaHCO₃-solution/H₂O (1:1) and sat. NaCl-solution, dried with MgSO₄ and evaporated. The crude product (15.78 g) was purified on silica gel (10 to 100% EtOAc in n-heptane) to yield 12.31 g (81.8%) of the title compound lg as light yellow foam.

[0755] LCMS-Method C:

[0756] UV-wavelength [nm]=220: Rₜ[min]=2.57

[0757] Ionization method: ES⁻: [M−H+FA]⁻=625.1

[0758] 1H-NMR (DMSO-d6, 400 MHz) δ[ppm]: 8.80 (s, 1 H), 8.75 (s, 1 H), 7.16-7.39 (m, 10 H), 6.38 (d, J=4.2 Hz, 1 H), 6.10 (dd, J=5.6, 4.3 Hz, 1 H), 4.86 (d, J=5.7 Hz, 1 H), 4.54-4.68 (m, 2 H), 4.37-4.47 (m, 3 H), 4.24 (d, J=12.0 Hz, 1 H), 3.69 (d, J=10.1 Hz, 1 H), 3.60 (d, J=10.1 Hz, 1 H), 2.05 (s, 3 H), 1.99 (s, 3 H).

### 2h: (2R,3R,4S,5R)-2-(6-aminopurin-9-yl)-4-benzyloxy-5-(benzyloxymethyl)-5-(hydroxy-methyl)tetrahydrofuran-3-ol

[0759] 12.30 g (21.2 mmol) of the chloropurine riboside 1g were dissolved in 40 ml ACN. After adding 68.0 g (77.2 ml, 1.40 mol) aqueous ammonia (35%), the reaction solution was transferred in an autoclave and heated at 70° C. for 18 h. The reaction mixture was evaporated and the aqueous residue was extracted 3× with 150 ml DCM/isopropanol (4:1). The organic layers were combined, dried with MgSO₄ and evaporated, to yield 9.37 g crude product, which was recrystallized from 400 ml ACN, which gave 6.92 g (68.5%) of the adenosine analog 2h as colourless solid.

[0760] LCMS-Method C:

[0761] UV-wavelength [nm]=220: Rₜ[min]=1.69

[0762] Ionization method: ES⁺: [M+H]⁺=477.9

[0763] 1H-NMR (DMSO-d6, 400 MHz) δ[ppm]: 8.22 (s, 1 H), 8.12 (s, 1 H), 7.24-7.42 (m, 12 H), 6.01 (d, J=5.7 Hz, 1 H), 5.72 (d, J=7.3 Hz, 1 H), 5.01 (br t, J=5.1 Hz, 1 H), 4.91-4.98 (m, 1 H), 4.84 (d, J=11.9 Hz, 1 H), 4.60 (d, J=11.7 Hz, 1 H), 4.51 (s, 2 H), 4.34 (d, J=5.3 Hz, 1 H), 3.57-3.72 (m, 4 H).

### 2e: N-[9-[(2R,3R,4S,5R)-4-benzyloxy-5-(benzyloxymethyl)-3-hydroxy-5-(hydroxymethyl)-tetrahydrofuran-2-yl]purin-6-yl]benzamide

[0764] 6.91 g (14.5 mmol) of 2h were dissolved in 100 ml pyridine under an Ar-atmosphere. At room temperature, 10.17 g (8.41 ml, 72.4 mmol) benzoyl chloride were added and the reaction was stirred for 1 h. The solvent was removed in vacuo and the residue was dissolved in H₂O and extracted with EtOAc. The organic layer was separated and washed with 1 N HCl (2×250 ml), H₂O (1×200 ml), sat. NaHCO₃-solution (2×200 ml) and sat. NaCl-solution (1×200 ml). After drying with MgSO₄, the solvent was removed and the crude product (14.66 g, yellow foam) dissolved in 140 ml pyridine/EtOH (1:1). At room temperature, 108.5 ml (217.1 mmol) 2 N NaOH were added and the reaction mixture was stirred for 30 min. After adding 11 ml AcOH, the reaction solution was concentrated i.vac. The residue was treated with 200 ml H₂O and extracted with 200 ml EtOAc. The organic layer was washed with 1 N HCl (2×200 ml), H₂O (1×200 ml) and sat. NaHCO₃-solution (1×200 ml), dried with MgSO₄ and evaporated. Purification of the crude product (9.0 g) on silica (20 to 100% MeOH/EtOAc (9:1) in n-heptane) gave 7.25 g (86.1%) of the title compound 2e as colourless foam.

[0765] LCMS-Method C:

[0766] UV-wavelength [nm]=220: Rₜ[min]=2.12

[0767] Ionization method: ES⁺: [M+H]⁺=582.4

[0768] 1H-NMR (DMSO-d6, 400 MHz) δ[ppm]: 11.19 (s, 1 H), 8.72 (s, 1 H), 8.58 (s, 1 H), 8.05 (br d, J=7.3 Hz, 2 H), 7.64 (br t, J=7.3 Hz, 1 H), 7.52-7.60 (br t, 2 H), 7.25-7.44 (m, 10 H), 6.15 (d, J=5.6 Hz, 1 H), 5.82 (d, J=7.5 Hz, 1 H), 4.99-5.08 (m, 2 H), 4.86 (d, J=11.9 Hz, 1 H), 4.62 (d, J=11.9 Hz, 1 H), 4.52 (s, 2 H), 4.38 (d, J=5.1 Hz, 1 H), 3.59-3.74 (m, 4 H).

[chemical structure]

### 8: [(2S,6R)-6-(2,4-dioxopyrimidin-1-yl)-4-isopropyl-2-(triisopropylsilyloxymethyl)-morpholin-2-yl]methyl benzoate

[0769] 6.00 g (13.2 mmol) of the starting material 7b were dissolved in 80 ml dry pyridine. At room temperature 2.80 g (2.32 ml, 19.75 mmol) benzoylchloride were added and the reaction was stirred for 20 h to achieve complete conversion. After evaporation of the solvent, the residue was dissolved in EtOAc, washed with 2×100 ml 10% citric acid-solution, H₂O, sat. NaHCO₃- and NaCl-solution. The organic layer was dried with MgSO₄ and evaporated, yielding 7.99 g (quant.) of the title compound as colourless foam, which was used without further purification.

[0770] LCMS-Method A:

[0771] UV-wavelength [nm]=220: Rₜ[min]=2.23

[0772] Ionization method: ES⁺: [M+H]⁺=560.5

### 9: [(2S,6R)-6-(4-amino-2-oxo-pyrimidin-1-yl)-4-isopropyl-2-(triisopropylsilyloxymethyl)-morpholin-2-yl]methyl benzoate

[0773] Starting compound 8 (7.99 g crude, 13.2 mmol) was dissolved in 200 ml dry ACN. After adding 22.88 g (31.4 ml, 223.8 mmol) NEt₃ and 11.13 g (158.0 mmol) 1H-1,2,4-triazole, the solution was cooled to 0° C. and a solution of 6.06 g (3.68 ml 39.5 mmol) POCl₃ in 50 ml dry ACN was added under vigorous strirring. The ice bath was removed and the solution was stirred for 2 h. Under reduced pressure, about 200 ml of the solvent were evaporated and the remaining solution was poured into 500 ml sat. NaCHO₃-solution/H₂O (1:1). The aqueous mixture was extracted 3× with 150 ml DCM and the combined organic extracts were dried with MgSO₄. After evaporation of the solvent, the crude intermediate (9.1 g, yellow foam) was dissolved in 200 ml ACN and 100 ml of an aqueous ammonia-solution (32%) were added. The reaction solution was stirred for 18 h at room temperature, when complete conversion was achieved. The solvents were removed under reduced pressure and 100 ml H₂O were added to the residue. Extraction with 2×200 ml DCM, drying the organic phases with MgSO₄ and evaporation of the solvent gave 7.65 g (quant.) of crude compound 9, which was used without additional purification.

[0774] LCMS-Method A:

[0775] UV-wavelength [nm]=220: Rₜ[min]=2.02

[0776] Ionization method: ES⁻: [M−H]⁻=557.4

### 10: [(2S,6R)-6-(4-benzamido-2-oxo-pyrimidin-1-yl)-4-isopropyl-2-(triisopropylsilyloxy-methyl)morpholin-2-yl]methyl benzoate

[0777] 7.64 g (13.2 mmol) of starting compound 9 were dissolved in 130 ml dry pyridine. At room temperature, 2.90 g (2.40 ml, 20.5 mmol) benzoylchloride were added and the solution was stirred for 20 h, when complete conversion was achieved. After evaporation of the solvent, the residue was dissolved in EtOAc, washed with 2×100 ml 10% citric acid-solution, H₂O, sat. NaHOC₃- and NaCl-solution. The organic layer was dried with MgSO₄ and evaporated, yielding 8.88 g of the crude product, which was purified by silicagel chromatography (0 to 100% EtOAc in n-heptane), yielding 6.69 g (76.7%) of the title compound 10 as light yellow foam.

[0778] LCMS-Method A:

[0779] UV-wavelength [nm]=220: Rₜ[min]=2.29

[0780] Ionization method: ES⁻: [M−H]⁻=661.5

### 7f: N-[1-[(2R,6S)-6-(hydroxymethyl)-4-isopropyl-6-(triisopropylsilyloxymethyl)morpholin-2-yl]-2-oxo-pyrimidin-4-yl]benzamide

[0781] 3.63 g (5.48 mmol) of compound 10 were dissolved in 45 ml pyridine/EtOH (2:1). At 0° C., 27.4 ml (27.4 mmol) of a 1 M NaOH-solution were added. The solution was stirred 30 min at 0° C. and another 3 h at room temperature, to achieve complete conversion. The pH was adjusted to about 6 by adding citric acid monohydrate (approx. 2.0 g). The organic solvents were removed at 35° C. and the aqueous solution was extracted with EtOAc. The organic phase was washed 3× with 150 ml 10% citric acid solution, H₂O, sat. NaHCO₃- and NaCl-solution. After drying with MgSO₄, the solvent was evaporated. The obtained crude product (2.73 g, yellow foam) was purified by silicagel chromatography (10 to 70% EtOAc in n-heptane), which gave 2.25 g (73.4%) of the title compound 7f as light yellow foam.

[0782] LCMS-Method A:

[0783] UV-wavelength [nm]=220: Rₜ[min]=1.89

[0784] Ionization method: ES⁺: [M+H]⁺=559.5

[0785] 1H-NMR (DMSO-d6, 400 MHz) δ[ppm]: 11.23 (s, 1 H), 8.31 (d, J=7.5 Hz, 1 H), 8.01 (d, J=7.3 Hz, 2 H), 7.63 (t, J=7.5 Hz, 1 H), 7.52 (m, 2 H), 7.37 (d, J=7.5 Hz, 1 H), 5.86 (dd, J=9.5, 2.6 Hz, 1 H), 4.67 (t, J=5.9 Hz, 1 H), 4.06 (d, J=9.4 Hz, 1 H), 3.76 (d, J=9.3 Hz, 1 H), 3.51 (m, 2 H), 2.98 (br d, J=10.5 Hz, 1 H), 2.64-2.83 (m, 2 H), 2.31 (m, 1 H), 2.00 (m, 1 H), 0.93-1.14 (m, 27 H).

[chemical structure]

### 11: [(2S,6R)-4-isopropyl-6-(6-oxo-1H-purin-9-yl)-2-(triisopropylsilyloxymethyl)morpholin-2-yl]methyl benzoate

[0786] 2.68 g (5.59 mmol) of the starting material 7d, 2.53 g (3.42 ml, 19.55 mmol) DIPEA and 0.34 g (2.79 mmol) DMAP were dissolved in 50 ml dry DCM. At room temperature, 1.18 g (0.97 ml, 8.38 mmol) benzoylchloride were added and the reaction was stirred for 18 h to achieve complete conversion. After adding 20 ml MeOH, the solvent was evaporated and the residue was dissolved in EtOAc, washed with 2×100 ml 10% citric acid-solution, sat. NaHCO₃- and NaCl-solution. The organic layer phase was dried with MgSO₄ and evaporated, yielding 3.47 g (quant., crude) of the title compound 11 as colourless foam, which was used without further purification.

[0787] LCMS-Method A:

[0788] UV-wavelength [nm]=220: Rₜ[min]=2.18

[0789] Ionization method: ES⁺: [M+H]⁺=584.4

### 12: [(2S,6R)-6-(6-chloropurin-9-yl)-4-isopropyl-2-(triisopropylsilyloxymethyl)morpholin-2-yl]methyl benzoate

[0790] Starting compound 11 (2.86 g crude, 4.90 mmol), N,N-dimethylaniline (1.28 g, 1.34 ml, 10.53 mmol) and tetraethylammonium chloride (1.24 g, 7.35 mmol) were dissolved in 30 ml dry ACN. Under stirring, 1.70 g (1.03 ml, 11.07 mmol) POCl₃ were added at room temperature and the solution was refluxed for 3 h. After cooling to room temperature, the mixture was poured into 150 ml sat. NaHCO₃-solution and 3.0 g solid NaHCO₃ were additionally added. The reaction was stirred for 30 min and extracted with 100 ml DCM. The layers were separated and the aqueous phase was extracted 2× with 50 ml DCM. The combined organic layers were dried with MgSO₄ and evaporated. After purification of the crude product on silicagel (0 to 50% EtOAc in n-heptane) 1.52 g (51.4%) of the title compound 12 could be isolated as light yellow foam.

[0791] LCMS-Method A:

[0792] UV-wavelength [nm]=220: Rₜ[min]=2.33

[0793] Ionization method: ES⁺: [M+H]⁺=602.4

### 13: [(2S,6R)-6-(6-benzamidopurin-9-yl)-4-isopropyl-2-(triisopropylsilyloxymethyl)morpholin-2-yl]methyl benzoate

[0794] Chloropurin 12 (1.54 g, 2.56 mmol), benzamide (646 mg, 3.84 mmol) and Cs₂CO₃ (1.25 g, 3.84 mmol) were dissolved in 30 ml dioxane. After adding Pd(OAc)₂ (43 mg, 191.8 μmol) and xantphos (111 mg, 191.8 μmol), the reaction solution was stirred under argon for 1 h at 100° C., to achieve complete conversion. The reaction was cooled to room temperature and diluted with 50 ml EtOAc. The solution was filtered and the filtrate was evaporated in vacuo. The crude product (2.48 g) was purified on silicagel (10 to 100% EtOAc in n-heptane), which gave 1.29 g (73.4%) of the desired compound 13 as colourless foam.

[0795] LCMS-Method A:

[0796] UV-wavelength [nm]=220: Rₜ[min]=2.26

[0797] Ionization method: ES⁺: [M+H]⁺=687.6

### 7e: N-[9-[(2R,6S)-6-(hydroxymethyl)-4-isopropyl-6-(triisopropylsilyloxymethyl)morpholin-2-yl]purin-6-yl]benzamide

[0798] 1.00 g (1.46 mmol) of the benzoate 13 were saponified following the protocol described for 7f. Without chromatographic puridication, 731 mg (86.2%, crude) of the title compound 7e could be isolated as light yellow foam.

[0799] LCMS-Method A:

[0800] UV-wavelength [nm]=220: Rₜ[min]=1.97

[0801] Ionization method: ES⁺: [M+H]⁺=583.5

[0802] 1H-NMR (DMSO-d6, 400 MHz) δ[ppm]: 11.17 (s, 1 H), 8.75 (s, 1 H), 8.71 (s, 1 H), 8.04 (d, J=7.2 Hz, 2 H), 7.65 (t, J=7.3 Hz, 1 H), 7.55 (m, 2 H), 6.11 (dd, J=9.9, 2.7 Hz, 1 H), 4.61 (t, J=5.9 Hz, 1 H), 4.15 (d, J=9.1 Hz, 1 H), 3.85 (d, J=9.2 Hz, 1 H), 3.46 (br d, J=6.7 Hz, 2 H), 3.08 (br d, J=10.4 Hz, 1 H), 2.71-2.89 (m, 3 H), 2.37 (d, J=11.5 Hz, 1 H), 0.95-1.19 (m, 27 H).

[chemical structure]

### 14a: 1-[(2R,6S)-6-[[bis(4-methoxyphenyl)-phenyl-methoxy]methyl]-4-isopropyl-6-(triisopropylsilyloxymethyl)morpholin-2-yl]-5-methyl-pyrimidine-2,4-dione

[0803] 810 mg (1.7 mmol) of the primary alcohol 7a and 873 mg (1.20 ml, 8.6 mmol) NEt₃ were dissolved in 30 ml DCM. At room temperature, 716 mg (2.1 mmol) DMT-Cl were added and the reaction was stirred for 2 h at room temperature. After adding another 0.6 equivalents of DMT-Cl and stirring overnight, the reaction showed complete conversion. The solution of the crude product was directly transferred to a silica column and purified with 0 to 65% EtOAc in n-heptane, yielding 1.19 g (89.0%) of the desired product 14a as light yellow foam.

[0804] LCMS-Method A:

[0805] UV-wavelength [nm]=220: Rₜ[min]=2.38

[0806] Ionization method: ES⁺: [M+H]⁺=772.5

### 14b: 1-[(2R,6S)-6-[[bis(4-methoxyphenyl)-phenyl-methoxy]methyl]-4-isopropyl-6-(triisopropylsilyloxymethyl)morpholin-2-yl]pyrimidine-2,4-dione

[0807] 1.00 g (2.2 mmol) 7b and 1.42 g (1.92 ml, 11.0 mmol) DIPEA were dissolved in 30 ml DCM. 948 mg (2.7 mmol) DMT-Chloride were added and the reaction was stirred at room temperature overnight to achieve complete conversion. After adding Isolute-sorbent, the organic solvent was removed and the solid material was purified on silica (preconditioned with n-heptane+0.5% NEt₃, 0 to 75% EtOAc in n-heptane), yielding 1.61 g (96.8%) of the DMT-protected product 14b as light yellow foam.

[0808] LCMS-Method A:

[0809] UV-wavelength [nm]=220: Rₜ[min]=2.34

[0810] Ionization method: ES⁺: [M+H]⁺=758.3

### 14c: N-[9-[(2R,6S)-6-[[bis(4-methoxyphenyl)-phenyl-methoxy]methyl]-4-isopropyl-6-(triisopropylsilyloxymethyl)morpholin-2-yl]-6-oxo-1H-purin-2-yl]-2-methyl-propanamide

[0811] 1.00 g (1.77 mmol) of the starting compound 7c was protected following the protocol decribed for 14a. After purification on silicagel (0 to 5% MeOH in DCM), the desired product 14c was isolated as yellow foam (1.46 g, 94.8%).

[0812] LCMS-Method C:

[0813] UV-wavelength [nm]=220: Rₜ[min]=3.66

[0814] Ionization method: ES⁺: [M+H]⁺=867.6

### 14e: N-[9-[(2R,6S)-6-[[bis(4-methoxyphenyl)-phenyl-methoxy]methyl]-4-isopropyl-6-(triisopropylsilyloxymethyl)morpholin-2-yl]purin-6-yl]benzamide

[0815] 950 mg (1.63 mmol) of the starting material 7e were dissolved in 10 ml DCM/pyridine (1:1). After adding a solution of 733 mg (2.12 mmol) DMT-Cl in 20 ml DCM, the reaction was allowed to stirr for 1.5 h to achieve complete conversion. After evaporation of the solvent, the residue was taken up in EtOAc and washed with H₂O, 2× with 10% citric acid solution and sat. NaHCO₃-solution. After drying with MgSO₄, the solvent was removed and the crude product purified on silica (pretreated with n-heptane+0.5% NEt₃; 0 to 50% EtOAc in n-heptane), yielding 1.20 g (83.2%) of the DMT-ether 14e as colourless foam.

[0816] LCMS-Method A:

[0817] UV-wavelength [nm]=220: Rₜ[min]=2.38

[0818] Ionization method: ES⁻: [M−H]⁻=883.5

### 14f: N-[1-[(2R,6S)-6-[[bis(4-methoxyphenyl)-phenyl-methoxy]methyl]-4-isopropyl-6-(triisopropylsilyloxymethyl)morpholin-2-yl]-2-oxo-pyrimidin-4-yl]benzamide

[0819] 2.25 g (4.02 mmol) of the starting material 7f were protected following the protocol for 14e in dry pyridine. After final chromatography on silica (pretreated with n-heptane+0.5% NEt₃; 0 to 80% EtOAc in n-heptane), 3.35 g (96.9%) of the title compound 14f were isolated as yellow foam.

[0820] LCMS-Method A:

[0821] UV-wavelength [nm]=220: Rₜ[min]=2.40

[0822] Ionization method: ES⁺: [M+H]⁺=861.6

### 15a: 1-[(2R,6R)-6-[[bis(4-methoxyphenyl)-phenyl-methoxy]methyl]-6-(hydroxymethyl)-4-isopropyl-morpholin-2-yl]-5-methyl-pyrimidine-2,4-dione

[0823] 1.18 g (1.5 mmol) of the TIPS-protected morpholine 14a and 6.74 g (9.26 ml, 66.0 mmol) triethyl amine were dissolved in 30 ml THF. At room temperature, 12.23 g (12.4 ml, 73.6 mmol) NEt₃.3 HF were added and the reaction was stirred at 65° C. for 1 h. After standing at room temperature overnight, 10 ml NMP were added and the reaction was stirred at 65° C. for additional 14 h to achieve complete conversion. The solvent was concentrated i.vac. and the remaining NMP-solution was added to a H₂O/sat. NaHCO₃-solution mixture (1:2). The aqueous solution was extracted with EtOAc and the organic layer was washed three times with H₂O and sat. NaCl-solution. After drying with MgSO₄, the crude product was purified by silicagel chromatography (preconditioned with 1% NEt₃ in n-heptane, 10 to 100% ethylacetate in n-heptane), which gave 645 mg (68.8%) of the desilylated product 15a as colourless foam.

[0824] LCMS-Method A:

[0825] UV-wavelength [nm]=220: Rₜ[min]=1.67

[0826] Ionization method: ES⁺: [M+H]⁺=616.4

[0827] 1H-NMR (DMSO-d6, 400 MHz) δ[ppm]: 11.36 (s, 1 H), 7.53-7.58 (m, 1 H), 7.41 (d, J=7.34 Hz, 2 H), 7.20-7.31 (m, 7 H), 6.87 (d, J=8.80 Hz, 4 H), 5.82 (dd, J=9.66, 2.93 Hz, 1 H), 4.61 (br s, 1 H), 3.67-3.79 (m, 8 H), 3.07 (s, 1 H), 2.97-3.10 (m, 1 H), 2.80 (br d, J=9.78 Hz, 1 H), 2.63-2.76 (m, 2 H), 2.17-2.31 (m, 2 H), 1.69 (s, 3 H), 0.95 (d, J=6.60 Hz, 6 H).

### 15b: 1-[(2R,6R)-6-[[bis(4-methoxyphenyl)-phenyl-methoxy]methyl]-6-(hydroxymethyl)-4-isopropyl-morpholin-2-yl]pyrimidine-2,4-dione

[0828] 1.60 g (2.1 mmol) 14b were dissolved in 20 ml NMP. After adding 4.73 g (6.50 ml, 46.3 mmol) NEt₃ and 8.41 g (8.50 ml, 50.6 mmol) NEt₃.3 HF, the mixture was stirred 15 h at room temperature followed by 5 h at 65° C. The mixture was cooled down to room temperature, followed by the addition of 250 ml sat. NaHCO₃-solution and 250 ml H₂O. After extraction with 250 ml EtOAc, the organic layer was washed with H₂O (2×) and sat. NaCl-solution. The organic phase was dried with MgSO₄ and purified on silica (preconditioned with n-heptane+0.5% NEt₃, 0 to 100% EtOAc in n-heptane), which gave the desired alcohol 15b as colourless foam (1.16 g, 91.1%).

[0829] LCMS-Method A:

[0830] UV-wavelength [nm]=220: Rₜ[min]=1.63

[0831] Ionization method: ES⁺: [M+H]⁺=602.3

[0832] 1H-NMR (DMSO-d6, 400 MHz) δ[ppm]: 11.36 (br s, 1 H), 7.63 (d, J=8.07 Hz, 1 H), 7.40 (br d, J=7.82 Hz, 2 H), 7.20-7.33 (m, 7 H), 6.88 (d, J=8.56 Hz, 4 H), 5.81 (br d, J=7.34 Hz, 1 H), 5.62 (d, J=8.07 Hz, 1 H), 4.62 (br s, 1 H), 3.78-3.95 (m, 1 H), 3.68-3.76 (m, 7 H), 3.11 (d, J=9.05 Hz, 1 H), 2.96 (br d, J=9.05 Hz, 1 H), 2.82 (br d, J=10.27 Hz, 1 H), 2.60-2.76 (m, 2 H), 2.10-2.22 (m, 2 H), 0.94 (d, J=6.36 Hz, 6 H).

### 15c: N-[9-[(2R,6R)-6-[[bis(4-methoxyphenyl)-phenyl-methoxy]methyl]-6-(hydroxymethyl)-4-isopropyl-morpholin-2-yl]-6-oxo-1H-purin-2-yl]-2-methyl-propanamide

[0833] 1.44 g (1.66 mmol) of the TIPS-protected alcohol 14c were dissolved in 17 ml THF. After adding 1.27 g (1.15 ml, 8.30 mmol) of a 65% Pyr. HF-solution, the reaction mixture was stirred at room temperature for 1 h. Under vigorous stirring, 0.9 g NaHCO₃ and 10 ml H₂O were added and stirring was continued for 2 h. The THF was removed and the aqoueous solution was extracted 10× with DCM/iPrOH (4:1). The combined organic layers were dried with MgSO₄ and evaporated, yielding 0.83 g (70.1%, crude) of 15c, which was used in the next steps without further purification.

[0834] LCMS-Method C:

[0835] UV-wavelength [nm]=220: Rₜ[min]=2.11

[0836] Ionization method: ES⁻: [M−H]⁻=709.5

[0837] 1H-NMR (DMSO-d6, 400 MHz) δ[ppm]: 12.09 (s, 1 H), 11.67 (s, 1 H), 8.05 (s, 1 H), 7.38 (d, J=7.34 Hz, 2 H), 7.18-7.30 (m, 7 H), 6.85 (d, J=8.80 Hz, 4 H), 5.92 (dd, J=8.99, 3.00 Hz, 1 H), 4.64 (t, J=5.14 Hz, 1 H), 3.71-3.84 (m, 8 H), 2.90-3.08 (m, 3 H), 2.55-2.83 (m, 4 H), 2.31-2.47 (m, 1 H), 1.12 (dd, J=6.79, 3.36 Hz, 6 H), 0.96 (d, J=6.48 Hz, 6 H).

### 15e: N-[9-[(2R,6R)-6-[[bis(4-methoxyphenyl)-phenyl-methoxy]methyl]-6-(hydroxymethyl)-4-isopropyl-morpholin-2-yl]purin-6-yl]benzamide

[0838] 1.20 g (1.35 mmol) of the starting compound 14e and 1.91 g (2.63 ml, 18.90 mmol) NEt₃ were dissolved in 20 ml THF. After adding 3.59 g (3.63 ml, 21.60 mmol) NEt₃.3HF, the solution was heated at 65° C., followed by the addition of another 0.95 g (1.32 ml, 9.45 mmol) NEt₃ and 1.80 g (1.82 ml, 10.8 mmol) NEt₃.3HF. The reaction mixture was stirred at 65° C. until complete conversion was achieved (approx. 10 h). After cooling to room temperature, the mixture was poured in 150 ml H₂O/sat. NaHCO₃-solution (1:1) and stirred for 30 min. The aqoueous solution was extracted 3× with 50 DCM, dried with MgSO₄ and evaporated. After silicagel chromatography (10 to 100% EtOAc in n-heptane), 835 mg (84.9%) of the deprotected product 15e were isolated as colourless foam.

[0839] LCMS-Method A:

[0840] UV-wavelength [nm]=220: Rₜ[min]=1.74

[0841] Ionization method: ES⁺: [M+H]⁺=729.5

[0842] 1H-NMR (DMSO-d6, 400 MHz) δ[ppm]: 11.21 (br s, 1 H), 8.74 (s, 1 H), 8.54 (s, 1 H), 8.04 (d, J=7.62 Hz, 2 H), 7.62-7.67 (m, 1 H), 7.52-7.58 (m, 2 H), 7.37 (d, J=7.34 Hz, 2 H), 7.15-7.29 (m, 7 H), 6.82 (d, J=7.95 Hz, 4 H), 6.16 (dd, J=9.17, 2.93 Hz, 1 H), 4.67 (t, J=5.20 Hz, 1 H), 3.86-3.96 (m, 1 H), 3.79 (dd, J=11.00, 5.87 Hz, 1 H), 3.69-3.73 (m, 6 H), 3.01-3.15 (m, 2 H), 2.90-2.99 (m, 2 H), 2.68-2.84 (m, 2 H), 2.40 (m, 1 H), 1.00 (d, J=6.60 Hz, 6 H).

### 15f: N-[1-[(2R,6R)-6-[[bis(4-methoxyphenyl)-phenyl-methoxy]methyl]-6-(hydroxymethyl)-4-isopropyl-morpholin-2-yl]-2-oxo-pyrimidin-4-yl]benzamide

[0843] 3.35 g (3.88 mmol) of the starting compound 14f were treated with NEt₃.3HF as described for 15e. After a reaction time of 20 h at 70° C., complete conversion was achieved. Working up and final purification as for 15e, gave 2.57 g (93.7%) of the title compound 15f as colorless foam.

[0844] LCMS-Method A:

[0845] UV-wavelength [nm]=220: Rₜ[min]=1.79

[0846] Ionization method: ES⁺: [M+H]⁺=705.4

[0847] 1H-NMR (DMSO-d6, 400 MHz) δ[ppm]: 11.28 (br s, 1 H), 8.10 (br d, J=7.58 Hz, 1 H), 8.00 (d, J=7.69 Hz, 2 H), 7.58-7.67 (m, 1 H), 7.51 (t, J=7.64 Hz, 2 H), 7.21-7.43 (m, 10 H), 6.89 (d, J=8.80 Hz, 4 H), 5.93 (dd, J=9.41, 2.69 Hz, 1 H), 4.66 (t, J=5.26 Hz, 1 H), 3.91 (dd, J=10.94, 4.22 Hz, 1 H), 3.71-3.77 (m, 7 H), 3.19 (d, J=9.05 Hz, 1 H), 2.92-3.06 (m, 2 H), 2.65-2.79 (m, 2 H), 2.18 (d, J=11.49 Hz, 1 H), 2.07 (t, J=10.21 Hz, 1 H), 0.95 (d, J=6.36 Hz, 6 H).

### 16a: 3-[[(2S,6R)-2-[[bis(4-methoxyphenyl)-phenyl-methoxy]methyl]-4-isopropyl-6-(5-methyl-2,4-dioxo-pyrimidin-1-yl)morpholin-2-yl]methoxy-(diisopropylamino)phosphanyl]oxy-propanenitrile

[0848] To a solution of 624 mg (1.0 mmol) 15a and 401.0 mg (513 μl, 3.0 mmol) N,N-diisoproylethylamine in 15 ml dry DCM, 370.9 mg (349.6 μl, 1.5 mmol) 2-cyanoethyl-N,N-diisopropylchlorophosphoramidite were added at room temperature under an Ar-atmosphere. After stirring for 1 h, the reaction was quenched by adding 200 μl n-butanol and stirring was continued for 10 min. The reaction solution was washed with H₂O and the aqueous phase was extracted once with DCM. After drying the organic layers with MgSO₄, the solvent was removed and the crude product was purified by silicagel chromatography (preconditioned with 0.5% NEt₃ in n-heptane, 10 to 100% methyl-tert. butyl ether in n-heptane), yielding 668 mg (80.8%) of the desired phosphoramidite (mixture of diastereomers) 16a as colourless foam.

[0849] LCMS-Method B-2:

[0850] UV-wavelength [nm]=220: Rₜ[min]=0.82

[0851] Ionization method: ES⁺: [M]⁺=733.1 (M−ⁱPr₂N+OH+H⁺)

[0852] 1H-NMR (DMSO-d6, 400 MHz) δ[ppm]: 11.37,11.36 (2×s, 1 H), 7.60, 7.56 (2×s, 1 H), 7.41 (m, 2 H), 7.20-7.32 (m, 7 H), 6.83-6.90 (m, 4 H), 5.88 (m, 1 H), 3.84-4.05 (m, 2 H), 3.74 (s, 6 H), 3.54-3.73 (m, 2 H), 3.40-3.54 (m, 2 H), 3.14 (m, 1 H), 2.95-3.05 (m, 1 H), 2.57-2.84 (m, 5 H), 2.15-2.37 (m, 2 H), 1.76, 1.73 (2×s, 3 H), 0.93-1.14 (m, 18 H).

[0853] 31P-NMR (DMSO-d6, 162 MHz) δ[ppm]: 148.1, 147.6.

### 16b: 3-[[(2S,6R)-2-[[bis(4-methoxyphenyl)-phenyl-methoxy]methyl]-6-(2,4-dioxopyrimidin-1-yl)-4-isopropyl-morpholin-2-yl]methoxy-(diisopropylamino)phosphanyl]oxypropanenitrile

[0854] The title compound was prepared following the protocol decribed for 16a. Starting with 1.95 g (3.2 mmol) of primary alcohol 15b, 1.70 g (65.7%) of the desired phosphoramidite 16b were isolated as colourless foam after purification on silicagel (pre-conditioned with n-heptane+0.5% NEt₃, 0 to 80% EtOAc in n-heptane).

[0855] LCMS-Method A:

[0856] UV-wavelength [nm]=220: Rₜ[min]=1.85

[0857] Ionization method: ES⁺: [M]⁺=719.2 (M−ⁱPr₂N+OH+H⁺)

[0858] 1H-NMR (DMSO-d6, 400 MHz) δ[ppm]: 11.36 (br s, 1 H), 7.67, 7.63 (2×d, J=8.19 Hz, 1 H), 7.35-7.44 (m, 2 H), 7.20-7.32 (m, 7 H), 6.84-6.89 (m, 4 H), 5.81-5.89 (m, 1 H), 5.67, 5.63 (2×d, J=8.13 Hz, 1 H), 3.89-4.08 (m, 2 H), 3.73 (s, 6 H), 3.54-3.72 (m, 2 H), 3.41-3.54 (m, 2 H), 3.16 (d, J=9.05 Hz, 1 H), 2.96 (t, J=9.05 Hz, 1 H), 2.84 (br d, J=10.15 Hz, 1 H), 2.55-2.76 (m, 4 H), 2.10-2.33 (m, 2 H), 0.89-1.12 (m, 18 H).

[0859] 31P-NMR (DMSO-d6, 162 MHz) δ[ppm]: 148.3, 147.6.

### 16c: N-[9-[(2R,6S)-6-[[bis(4-methoxyphenyl)-phenyl-methoxy]methyl]-6-[[2-cyanoethoxy-(diisopropylamino)phosphanyl]oxymethyl]-4-isopropyl-morpholin-2-yl]-6-oxo-1H-purin-2-yl]-2-methyl-propanamide

[0860] 100 mg (141 μmol) of the alcohol 15c, 0.2 g molecular sieves (4 Å) and 12.7 mg (70 μmol) diisopropylammonium tetrazolide were dissolved in 2.5 ml dry DCM. Under an Ar-atmosphere, 42.8 mg (45 μl, 138 μmol) 2-cyanoethyl-N,N,N′,N′-tetraisopropylphosphoro-diamidite were added and the solution was stirred for 2 h at room temperature to achieve complete conversion. After adding sat. NaHCO₃-solution, the organic phase was separated and the aqueous phase extracted with DCM. The combined organic layers were washed with sat. NaCl-solution, dried with MgSO₄ and evaporated. The crude product was purified on silica (preconditioned with DCM+0.5% NEt₃, 0 to 10% MeOH in DCM), yielding 87 mg (67.9%) of the title compound 16c as colourless foam.

[0861] LCMS-Method C:

[0862] UV-wavelength [nm]=220: Rₜ[min]=2.50, 2.52

[0863] Ionization method: ES⁺: [M−ⁱPr₂N+OH+H]⁺=828.3

[0864] 1H-NMR (DMSO-d6, 400 MHz) δ[ppm]: 12.08 (br s, 1 H), 11.62 (br s, 1 H), 8.09, 8.04 (2×s, 1 H), 7.33-7.40 (m, 2 H), 7.18-7.29 (m, 7 H), 6.81-6.87 (m, 4 H), 5.91 (m, 1 H), 3.93-4.07 (m, 2 H), 3.73 (s, 6 H), 3.54-3.72 (m, 2 H), 3.39-3.50 (m, 2 H), 3.11 (m, 1 H), 2.92-3.07 (m, 2 H), 2.54-2.81 (m, 6 H), 2.26-2.38 (m, 1 H), 0.94-1.16 (m, 18 H), 0.83-0.91 (m, 6 H).

[0865] 31P-NMR (DMSO-d6, 162 MHz) δ[ppm]: 147.5, 146.7.

### 16e: N-[9-[(2R,6S)-6-[[bis(4-methoxyphenyl)-phenyl-methoxy]methyl]-6-[[2-cyanoethoxy-(diisopropylamino)phosphanyl]oxymethyl]-4-isopropyl-morpholin-2-yl]purin-6-yl]benzamide

[0866] 820 mg (1.13 mmol) of 15e and 584 mg (3.38 mmol) diisopropylammonium tetrazolide were dissolved in 20 ml dry DCM. Under an Ar-atmosphere, 524 mg (1.69 mmol) 2-cyanoethyl-N,N,N′,N′-tetraisopropylphosphorodiamidite were added and the solution was stirred at room temperature. After stirring overnight, 50 ml H₂O were added and the layers were separated. The aqueous layer was extracted 1× with 30 ml DCM and the combined organic phases dried with MgSO₄. After evaporation of the solvent, the crude product was purified by silicagel chromatographie (pre-conditioned with n-heptane+0.5% NEt₃, 0 to 100% MTB-ether/DCM (1:1) in n-heptane), yielding 913 mg (87.3%) of the title compound 16e as colourless solid.

[0867] 1H-NMR (DMSO-d6, 400 MHz) δ[ppm]: 11.19 (s, 1 H), 8.76, 8.74 (2×s, 1 H), 8.61, 8.59 (2×s, 1 H), 8.04 (d, J=8.09 Hz, 2 H), 7.64 (t, J=7.37 Hz, 1 H), 7.51-7.60 (m, 2 H), 7.37 (m, 2 H), 7.16-7.28 (m, 7 H), 6.77-6.84 (m, 4 H), 6.19 (m, 1 H), 3.98-4.15 (m, 2 H), 3.71 (2×s, 6 H), 3.56-3.69 (m, 2 H), 3.41-3.56 (m, 2 H), 3.03-3.17 (m, 2 H), 2.89-3.01 (m, 2 H), 2.74-2.88 (m, 2 H), 2.70 (t, J=6.15 Hz, 1 H), 2.59 (m, 1 H), 2.36 (m, 1 H), 0.92-1.18 (m, 18 H).

[0868] 31P-NMR (DMSO-d6, 162 MHz) δ[ppm]: 147.0, 146.7.

### 16f: N-[1-[(2R,6S)-6-[[bis(4-methoxyphenyl)-phenyl-methoxy]methyl]-6-[[2-cyanoethoxy-(diisopropylamino)phosphanyl]oxymethyl]-4-isopropyl-morpholin-2-yl]-2-oxo-pyrimidin-4-yl]benzamide

[0869] 550 mg (0.78 mmol) of the primary alcohol 15f were phosphitylated following the protcol described for 16e. After chromatographic purification on silicagel (pre-conditioned with n-heptane+0.5% NEt₃, 0 to 100% MTB-ether/DCM (1:1) in n-heptane), 560 mg (79.3%) 16f were isolated as colourless foam.

[0870] 1H-NMR (DMSO-d6, 400 MHz) δ[ppm]: 11.29 (br s, 1 H), 8.12 (2×d, J=7.50 Hz, 1 H), 7.98-8.04 (m, 2 H), 7.63 (t, J=7.40 Hz, 1 H), 7.48-7.55 (m, 2 H), 7.36-7.45 (m, 3 H), 7.21-7.35 (m, 7 H), 6.88 (2×d, J=8.89, 4 H), 5.95, 6.01 (2×m, 1 H), 3.89-4.14 (m, 2 H), 3.74, 3.75 (2×s, 6 H), 3.55-3.72 (m, 2 H), 3.39-3.55 (m, 2 H), 3.24 (d, J=8.85 Hz, 1 H), 2.93-3.05 (m, 2 H), 2.68-2.87 (m, 3 H), 2.55-2.64 (m, 1 H), 2.10-2.23 (m, 2 H), 0.90-1.22 (m, 18 H).

[0871] 31P-NMR (DMSO-d6, 162 MHz) δ[ppm]: 147.4, 146.7.

[chemical structure]

### 17a: [(2S,6R)-4-isopropyl-6-(5-methyl-2,4-dioxo-pyrimidin-1-yl)-2-(triisopropylsilyloxy-methyl)morpholin-2-yl]methyl benzoate

[0872] 810 mg (1.7 mmol) of the free alcohol 7a were dissolved in 20 ml DCM. After adding 1.14 g (1.45 ml, 8.6 mmol) DIPEA and 294 mg (243 μl, 2.1 mmol) benzoyl chloride, the solution was stirred for 2 h at room temperature. To reach full conversion, another 0.2 equivalents of benzoyl chloride were added and stirring was continued for 18 hours. The reaction solution was directly transferred to a silicagel column, eluting with 0 to 65% EtOAc in n-heptane. 726 mg (73.3%) of the benzoylated product 17a were obtained as colourless foam.

[0873] LCMS-Method A:

[0874] UV-wavelength [nm]=220: Rₜ[min]=2.29

[0875] Ionization method: ES⁺: [M+H]⁺=574.3

### 17b: [(2S,6R)-6-(3-benzoyl-2,4-dioxo-pyrimidin-1-yl)-4-isopropyl-2-(triisopropylsilyloxy-methyl)morpholin-2-yl]methyl benzoate

[0876] 1.45 g (3.18 mmol) of the primary alcohol 7b were treated with benzoyl chloride as described in 17a, which led to a mixture of mono- and dibenzylated products. Therefore, the reaction mixture was evaporated and the crude product was dissolved in 30 ml pyridine. After adding 565 mg (3.98 mmol) benzoyl chloride and a catalytic amount of DMAP, the reaction solution was stirred at room temperature for 4 h. After evaporation of the solvent, the residue was dissolved in EtOAc and washed with 10% citric acid- and sat. NaCl-solution. The organic layer was dried with MgSO₄ and the solvent was removed. Final chromatography on silica (0 to 35% EtOAc in n-heptane) gave 1.64 g (77.8%) of the dibenzoylated product 17b.

[0877] LCMS-Method C:

[0878] UV-wavelength [nm]=220: Rₜ[min]=3.67

[0879] Ionization method: ES⁺: [M+H]⁺=664.4

### 17c: [(2S,6R)-4-isopropyl-6-[2-(2-methylpropanoylamino)-6-oxo-1H-purin-9-yl]-2-(triisopropylsilyloxymethyl)morpholin-2-yl]methyl benzoate

[0880] 0.89 g (1.58 mmol) of the starting compound 7c were dissolved in 30 ml pyridine. After adding 246 mg (203 μl, 1.73 mmol) benzoyl chloride, the reaction solution was stirred at room temperature overnight, when complete conversion was detected. The solvent was removed in vacuo and the residue was dissolved in EtOAc. After washing with H₂O, the organic phase was separated, dried with MgSO₄ and evaporated. Final purification on silica (0 to 5% MeOH in DCM) gave the title compound 17c as colourless foam (1.01 g, 95.4%).

[0881] LCMS-Method C:

[0882] UV-wavelength [nm]=220: Rₜ[min]=3.28

[0883] Ionization method: ES⁺: [M+H]⁺=669.2

### 18a: [(2R,6R)-2-(hydroxymethyl)-4-isopropyl-6-(5-methyl-2,4-dioxo-pyrimidin-1-yl)morpholin-2-yl]methyl benzoate

[0884] A solution of 720 mg (1.25 mmol) 17a in 15 ml THF was treated with 1.34 g (1.22 ml, 8.8 mmol) pyridine-hydrogen fluoride. After stirring for 1 h at room temperature, the reaction mixture was treated with sat. NaHCO₃-solution to reach a pH of 7.5. The solvent was concentrated under reduced pressure and the aqueous solution was extracted twice with DCM. The organic layers were dried with MgSO₄ and the solvent was removed. The crude product was codestilled twice with 50 ml of toluene and the remaining residue was purified by silicagel chromatography (0 to 100% EtOAc in n-heptane), which gave 502 mg (95.8%) of the desired product 18a as colourless foam.

[0885] LCMS-Method A:

[0886] UV-wavelength [nm]=220: Rₜ[min]=1.30

[0887] Ionization method: ES⁺: [M+H]⁺=418.2

### 18b: [(2R,6R)-6-(3-benzoyl-2,4-dioxo-pyrimidin-1-yl)-2-(hydroxymethyl)-4-isopropylmorpholin-2-yl]methyl benzoate

[0888] 1.64 g (2.47 mmol) of the silylether 17b were desilylated following the protocol described for 18a, which gave 1.33 g of the desired product 18b as crude product, which was used for the next steps without chromatographic purification.

[0889] LCMS-Method C:

[0890] UV-wavelength [nm]=220: Rₜ[min]=1.81

[0891] Ionization method: ES⁺: [M+H]⁺=508.2

### 18c: [(2R,6R)-2-(hydroxymethyl)-4-isopropyl-6-[2-(2-methylpropanoylamino)-6-oxo-1H-purin-9-yl]morpholin-2-yl]methyl benzoate

[0892] 1.0 g (1.49 mmol) of 17c were dissolved in 10 ml DMF. After adding 1.53 g (2.10 ml, 15.0 mmol) NEt₃ and 1.48 g (1.49 ml, 9.0 mmol) NEt₃.3 HF, the reaction solution was stirred at 90° C. for 2 h. After the mixture was cooled to room temperature, 2.5 g NaHCO₃ and 10 ml H₂O were added and the reacion mixture was stirred for 2 h. The solvents were evaporated in vacuo and the residue was dissolved 25 ml DCM/iPrOH and washed with H₂O. The organic phase was separated, dried with MgSO₄ and evaporated. The crude product was purified on silica (0 to 10% MeOH in DCM), which gave 245 mg (32.0%) of the desilylated product 18c as colourless foam.

[0893] LCMS-Method C:

[0894] UV-wavelength [nm]=220: Rₜ[min]=1.45

[0895] Ionization method: ES⁺: [M+H]⁺=513.1

### 18e: [(2R,6R)-6-(6-benzamidopurin-9-yl)-2-(hydroxymethyl)-4-isopropyl-morpholin-2-yl]-methyl benzoate

[0896] 1.23 g (1.79 mmol) of the silylether 13 were deprotected following the protocol described for 18a, which gave 939 mg (98.8%) of the title compound 18e after silicagel chromatography (0 to 100% EtOAc in n-heptane).

[0897] LCMS-Method C:

[0898] UV-wavelength [nm]=220: Rₜ[min]=1.60

[0899] Ionization method: ES⁻: [M−H]⁻=529.3

### 18f: [(2R,6R)-6-(4-benzamido-2-oxo-pyrimidin-1-yl)-2-(hydroxymethyl)-4-isopropyl-morpholin-2-yl]methyl benzoate

[0900] 3.63 g (5.48 mmol) of the silylether 10 were deprotected following the protocol described for 18a, which gave 2.45 (88.4%) of the title compound 18f after silicagel chromatography (5% MeOH in DCM).

[0901] LCMS-Method A:

[0902] UV-wavelength [nm]=220: Rₜ[min]=1.53

[0903] Ionization method: ES⁺: [M+H]⁺=507.3

### 19a: [(2R,6R)-2-[[bis(4-methoxyphenyl)-phenyl-methoxy]methyl]-4-isopropyl-6-(5-methyl-2,4-dioxo-pyrimidin-1-yl)morpholin-2-yl]methyl benzoate

[0904] 497 mg (1.2 mmol) of the starting compound 18a were dissolved in 15 ml DCM. After adding 502 mg (643 μl, 3.8 mmol) DIPEA and 659 mg (1.90 mmol) DMT-Cl, the reaction solution was stirred for 2 h at room temperature. The reaction mixture was evaporated i.vac. and the crude product was purified on silica gel (0 to 100% EtOAc in n-heptane). The DMT-protected product 19a was isolated as colourless foam (779 mg, 90.9%).

[0905] LCMS-Method A:

[0906] UV-wavelength [nm]=220: Rₜ[min]=2.14

[0907] Ionization method: ES⁺: [M+H]⁺=720.4

### 19b: [(2R,6R)-6-(3-benzoyl-2,4-dioxo-pyrimidin-1-yl)-2-[[bis(4-methoxyphenyl)-phenyl-methoxy]methyl]-4-isopropyl-morpholin-2-yl]methyl benzoate

[0908] 1.30 g (2.41 mmol) of the primary alcohol 18b and 492 mg (676 μl, 4.82 mmol) NEt₃ were dissolved in 20 ml DCM. After adding 925 mg (2.65 mmol) DMT-Cl, the reaction was stirred at room temperature for 6 h followed by the addition of another 925 mg (2.65 mmol) DMT-Cl. The reaction was stirred for 72 h. After adding 2.0 ml n-propanol, the solution was stirred for 10 min. The mixture was washed with H₂O and the organic layer was separated. After drying with MgSO₄, the solvent was removed in vacuo. The crude product was purified by silicagel chromatography (0 to 25% EtOAc in n-heptane), yielding 1.74 g (89.2%) of the desired DMT-ether 19b.

[0909] LCMS-Method C:

[0910] UV-wavelength [nm]=220: Rₜ[min]=3.25

[0911] Ionization method: ES⁺: [M+H]⁺=810.3

### 19c: [(2R,6R)-2-[[bis(4-methoxyphenyl)-phenyl-methoxy]methyl]-4-isopropyl-6-[2-(2-methylpropanoylamino)-6-oxo-1H-purin-9-yl]morpholin-2-yl]methyl benzoate

[0912] 240 mg (468 μmol) of the starting alcohol 18c were dissolved in 5.0 ml DCM. After the addition of 95.7 mg (131.5 μl, 936 μmol) NEt₃ and 180 mg (515 μmol) DMT-Cl, the reaction was stirred at room temperature for 3 d to achieve complete conversion. After adding 2.0 ml n-propanol, the solution was stirred for 10 min. The mixture was washed with H₂O and the organic layer was separated. After drying with MgSO₄, the solvent was removed in vacuo. The crude product was purified by silicagel chromatography (0 to 25% EtOAc in n-heptane), yielding 303 mg (79.4%) of the desired DMT-ether 19c.

[0913] LCMS-Method C:

[0914] UV-wavelength [nm]=220: Rₜ[min]=2.93

[0915] Ionization method: ES⁻: [M−H]⁻=813.2

### 19e: [(2R,6R)-6-(6-benzamidopurin-9-yl)-2-[[bis(4-methoxyphenyl)-phenyl-methoxy]methyl]-4-isopropyl-morpholin-2-yl]methyl benzoate

[0916] 934 mg (1.76 mmol) of the starting material 18e were dissolved in 20 ml DMC/pyridine (1:1). After adding 974 mg (2.82 mmol) DMT-Cl, the reaction solution was stirred for 17 h at room temperature. The solvents were removed in vacuo and the residue was dissolved in EtOAc and washed with H₂O, 2×10% citric acid-, sat. NaHCO₃- and NaCl-solution. The organic phase was dried with MgSO₄ and evaporated. The obtained crude product (1.77 g) was dissolved in 20 ml EtOAc/diethylether (1:2). After adding 40 ml of n-pentane, the precipitate was centrifuged and the supernatent was discarded. The precipitation procedure was repeated another two times, yielding the desired DMT-ether 19e as colourless solid.

[0917] LCMS-Method C:

[0918] UV-wavelength [nm]=220: Rₜ[min]=3.07

[0919] Ionization method: ES⁻: [M−H]⁻=831.5

### 19f: [(2R,6R)-6-(4-benzamido-2-oxo-pyrimidin-1-yl)-2-[[bis(4-methoxyphenyl)-phenyl-methoxy]methyl]-4-isopropyl-morpholin-2-yl]methyl benzoate

[0920] 2.45 g (4.84 mmol) 18f were dissolved in 40 ml pyridine. After adding 2.51 g (7.26 mmol) DMT-Cl, the reaction mixture was stirred at room temperature for 4 d. The solvent was removed in vacuo and the residue was dissolved in EtOAc and washed with H₂O, 2×10% citric acid-, sat. NaHCO₃- and NaCl-solution. The organic phase was dried with MgSO₄ and evaporated. The crude product was purified on silicagel (preconditioned with n-heptane+0.5% NEt₃, 0 to 100% EtOAc in n-heptane), yielding 3.69 g (94.3%) of the title compound 19f as colourless foam.

[0921] LCMS-Method A:

[0922] UV-wavelength [nm]=220: Rₜ[min]=2.14

[0923] Ionization method: ES⁻: [M−H]⁻=807.4

### 20a: 1-[(2R,6S)-6-[[bis(4-methoxyphenyl)-phenyl-methoxy]methyl]-6-(hydroxymethyl)-4-isopropyl-morpholin-2-yl]-5-methyl-pyrimidine-2,4-dione

[0924] The benzoyl ester 19a (775 mg, 1.1 mmol) was dissolved in 20 ml THF-Methanol (4:1). At room temperature, 4.31 ml (8.6 mmol) of a 2 N aqueous NaOH-solution were added and the reaction was stirred for 90 minutes. By adding citric acid monohydrate, the pH was adjusted between 7 and 8, then the solvent was removed under reduced pressure. The residue was taken up in DCM and H₂O. The oganic layer was separated and the aqueous phase was extracted with DCM. The combined organic phases were dried with MgSO₄ and evaporated. The crude product was purified by silicagel chromatography (5 to 100% EtOAc in n-heptane) yielding 663 mg (quant.) of the desired product 20a as colourless foam.

[0925] LCMS-Method A:

[0926] UV-wavelength [nm]=220: Rₜ[min]=1.73

[0927] Ionization method: ES⁺: [M+H]⁺=616.3

[0928] 1H-NMR (DMSO-d6, 400 MHz) δ[ppm]: 11.29 (s, 1 H), 7.60 (d, J=1.10 Hz, 1 H), 7.39 (d, J=6.93 Hz, 2 H), 7.19-7.33 (m, 7 H), 6.88 (d, J=8.68 Hz, 4 H), 5.60 (dd, J=9.96, 2.87 Hz, 1 H), 4.64 (t, J=5.93 Hz, 1 H), 3.74 (m, 6 H), 3.53-3.60 (m, 1 H), 3.44-3.52 (m, 1 H), 3.32-3.37 (m, 1 H), 3.09 (d, J=8.56 Hz, 1 H), 2.76 (br d, J=11.62 Hz, 1 H), 2.61-2.72 (m, 2 H), 2.37 (d, J=11.49 Hz, 1 H), 2.10 (t, J=10.45 Hz, 1 H), 1.78 (s, 3 H), 0.84-0.96 (m, 6 H).

### 20b: 1-[(2R,6S)-6-[[bis(4-methoxyphenyl)-phenyl-methoxy]methyl]-6-(hydroxymethyl)-4-iso-propyl-morpholin-2-yl]pyrimidine-2,4-dione

[0929] 1.40 g (1.73 mmol) of the starting compound 19b were dissolved in 80 ml MeOH. At room temperature, 13.83 ml (6.91 mmol) of a 0.5 M solution of NaOMe in MeOH were added and the reaction solution was stirred for 2 h, to achieve complete conversion. After adding 0.92 g citric acid, the solvent was removed. The residue was taken up in H₂O and the aqueous mixture was extracted 3× with DCM/iPrOH (4:1). The combined organic layers were dired with MgSO₄ and evaporated. to yield 0.85 g (81.2%, crude) of the desired compound 20b, which was used in the following step without further purification.

[0930] LCMS-Method C:

[0931] UV-wavelength [nm]=220: Rₜ[min]=2.04

[0932] Ionization method: ES⁺: [M+H]⁺=602.2

[0933] 1H-NMR (DMSO-d6, 400 MHz) δ[ppm]: 11.31 (s, 1 H), 7.75 (d, J=8.07 Hz, 1 H), 7.39 (d, J=7.34 Hz, 2 H), 7.10-7.33 (m, 8 H), 6.88 (d, J=8.31 Hz, 4 H), 5.55-5.64 (m, 2 H), 4.66 (t, J=5.93 Hz, 1 H), 3.74 (s, 6 H), 3.57 (dd, J=11.31, 6.79 Hz, 1 H), 3.46 (br dd, J=11.25, 5.14 Hz, 1 H), 3.08 (d, J=8.56 Hz, 1 H), 2.54-2.79 (m, 3 H), 2.32-2.39 (m, 1 H), 1.95-2.13 (m, 1 H), 0.86-0.98 (m, 6 H).

### 20c: N-[9-[(2R,6S)-6-[[bis(4-methoxyphenyl)-phenyl-methoxy]methyl]-6-(hydroxymethyl)-4-isopropyl-morpholin-2-yl]-6-oxo-1H-purin-2-yl]-2-methyl-propanamide

[0934] 260 mg (319 μmol) of the starting material 19c were dissolved 10 ml EtOH. After adding 1.0 ml (1.0 mmol) of a 1 M NaOH-solution, the solution was stirred for 4 h at room temperature to achieve complete conversion. The solution was neutralized with 1 M HCl and the solvent was removed in vacuo. The residue was dissolved in H₂O and extracted with DCM. The organic phase was separated, dried with MgSO₄ and evaporated. Final purification on silica (0 to 10% MeOH in DCM) gave 114 mg (50.3%) of the desired alcohol 20c as yellow solid.

[0935] LCMS-Method C:

[0936] UV-wavelength [nm]=220: Rₜ[min]=2.36

[0937] Ionization method: ES⁻: [M−H]⁻=709.3

[0938] 1H-NMR (DMSO-d6, 400 MHz) δ[ppm]: 12.08 (s, 1 H), 11.52 (s, 1 H), 8.20 (s, 1 H), 7.35-7.43 (m, 2 H), 7.20-7.33 (m, 7 H), 6.83-6.92 (m, 4 H), 5.56 (dd, J=9.60, 2.75 Hz, 1 H), 4.59-4.66 (m, 1 H), 3.73 (2×s, 6 H), 3.51-3.62 (m, 2 H), 3.43-3.50 (m, 1 H), 2.88-3.02 (m, 3 H), 2.70-2.82 (m, 2 H), 2.30-2.39 (m, 1 H), 1.11 (m, 6 H), 1.01 (d, J=6.48 Hz, 3 H), 0.97 (d, J=6.48 Hz, 3 H).

### 20e: N-[9-[(2R,6S)-6-[[bis(4-methoxyphenyl)-phenyl-methoxy]methyl]-6-(hydroxymethyl)-4-isopropyl-morpholin-2-yl]purin-6-yl]benzamide

[0939] The starting compound 19e (1.27 g, 1.52 mmol) was dissolved in 14 ml EtOH/pyridine (1:1). At 0° C., 7.59 ml (15.19 mmol) of a 1 M NaOH-solution were added and the reaction mixture was stirred for 1.5 h at room temperature. After adjusting the pH to 7 by adding citric acid monohydrate (958 mg), 70 ml H₂O and EtOAc were added. The organic layer was separated and washed with 10% citric acid solution (3×), H₂O, sat. NaHCO₃- and NaCl-solution. After drying with MgSO₄, the organic phase was evaporated, yielding 1.08 g of the crude product as colourless foam, which was dissolved in 20 ml EtOAc/diethylether (1:1). After adding 40 ml of n-pentane, the precipitate was centrifuged and the supernatent was discarded. The precipitation procedure was repeated another two times, yielding 964 mg (87.1%) of the title compound 20e as colourless foam.

[0940] LCMS-Method C:

[0941] UV-wavelength [nm]=220: Rₜ[min]=2.42

[0942] Ionization method: ES⁻: [M−H]⁻=727.5

[0943] 1H-NMR (DMSO-d6, 400 MHz) δ[ppm]: 11.18 (s, 1 H), 8.71 (s, 1 H), 8.69 (s, 1 H), 8.05 (d, J=7.34 Hz, 2 H), 7.61-7.68 (m, 1 H), 7.56 (t, J=7.58 Hz, 2 H), 7.45 (d, J=7.46 Hz, 2 H), 7.28-7.36 (m, 6 H), 7.20-7.28 (m, 1 H), 6.90 (dd, J=8.99, 2.26 Hz, 4 H), 5.89 (dd, J=9.84, 2.63 Hz, 1 H), 4.69 (t, J=5.99 Hz, 1 H), 3.75 (s, 6 H), 3.45-3.61 (m, 3 H), 3.24-3.30 (m, 1 H), 3.00 (br d, J=10.15 Hz, 1 H), 2.85 (br d, J=11.62 Hz, 1 H), 2.60-2.78 (m, 2 H), 2.45-2.55 (m, 1 H), 0.98 (br d, J=6.48 Hz, 3 H), 0.95 (br d, J=6.48 Hz, 3 H).

### 20f: N-[1-[(2R,6S)-6-[[bis (4-methoxyphenyl)-phenyl-methoxy]methyl]-6-(hydroxymethyl)-4-isopropyl-morpholin-2-yl]-2-oxo-pyrimidin-4-yl]benzamide

[0944] 3.68 g (4.55 mmol) 19f were saponified following the procedure described for 20e. The crude product was purified by silicagel chromatography (20 to 100% EtOAc in n-heptane), which gave 1.72 g (53.5%) of 20f as light yellow foam.

[0945] LCMS-Method A:

[0946] UV-wavelength [nm]=220: Rₜ[min]=1.81

[0947] Ionization method: ES⁻: [M−H]⁻=703.3

[0948] 1H-NMR (DMSO-d6, 400 MHz) δ[ppm]: 11.24 (s, 1 H), 8.29 (d, J=7.46 Hz, 1 H), 8.01 (d, J=7.46 Hz, 2 H), 7.62 (t, J=7.40 Hz, 1 H), 7.51 (t, J=7.70 Hz, 2 H), 7.20-7.41 (m, 10 H), 6.88 (dd, J=8.99, 2.38 Hz, 4 H), 5.68 (dd, J=9.35, 2.38 Hz, 1 H), 4.71 (t, J=6.11 Hz, 1 H), 3.74 (s, 6 H), 3.58-3.69 (m, 1 H), 3.48-3.58 (m, 1 H), 3.35-3.43 (m, 1 H), 3.11 (d, J=8.56 Hz, 1 H), 2.79-2.95 (m, 2 H), 2.66-2.76 (m, 1 H), 2.39-2.47 (m, 1 H), 1.91-2.00 (m, 1 H), 0.96 (d, J=6.54 Hz, 3 H), 0.94 (d, J=6.54 Hz, 3 H).

### 21a: 3-[[(2R,6R)-2-[[bis(4-methoxyphenyl)-phenyl-methoxy]methyl]-4-isopropyl-6-(5-methyl-2,4-dioxo-pyrimidin-1-yl)morpholin-2-yl]methoxy-(diisopropylamino)phosphanyl]-oxypropanenitrile

[0949] 764 mg (1.2 mmol) of the starting material 20a were converted to the desired phorphoramidite 21a following the protocol for 16a (scheme 5). 842 mg (83.2%, mixture of diastereomers) were obtained as colourless foam.

[0950] 1H-NMR (DMSO-d6, 400 MHz) δ[ppm]: 11.34, 11.32 (2×s, 1 H), 7.59, 7.54 (2×d, J=1.10 Hz, 1 H), 7.36-7.43 (m, 2 H), 7.20-7.34 (m, 7 H), 6.89 (m, 4 H), 5.59-5.75 (m, 1 H), 3.44-3.95 (m, 6 H), 3.74 (s, 6 H), 3.36 (m, 1 H), 3.22 (m, 1 H), 2.60-2.85 (m, 5 H), 2.36 (m, 1 H), 2.18 (m, 1 H), 1.78 (2×d, J=8.69 Hz, 3 H), 0.83-1.17 (m, 18 H).

[0951] 31P-NMR (DMSO-d6, 162 MHz) δ[ppm]: 148.6, 148.3.

### 21b: 3-[[(2R,6R)-2-[[bis(4-methoxyphenyl)-phenyl-methoxy]methyl]-6-(2,4-dioxopyrimidin-1-yl)-4-isopropyl-morpholin-2-yl]methoxy-(diisopropylamino)phosphanyl]oxypropanenitrile

[0952] Following the protocol for 16b (scheme 5), the title compound 21b was synthesized, starting with 1.36 g (2.26 mmol) of the corresponding alcohol 20b. 1.09 g (60.1%) of the title compound were isolated as colourless foam.

[0953] LCMS-Method B-1:

[0954] UV-wavelength [nm]=220: Rₜ[min]=0.80

[0955] Ionization method: ES⁺: [M−NⁱPr₂+OH+H]⁺=718.3

[0956] 1H-NMR (DMSO-d6, 400 MHz) δ[ppm]: 11.32 (br s, 1 H), 7.71, 7.66 (2×s, J=8.13 Hz, 1 H), 7.35-7.42 (m, 2 H), 7.20-7.33 (m, 7 H), 6.83-6.92 (m, 4 H), 5.60-5.70 (m, 2 H), 3.73 (s, 6 H), 3.43-3.95 (m, 6 H), 3.29-3.39 (m, 1 H), 3.22 (m, 1 H), 2.59-2.83 (m, 5 H), 2.33 (m, 1 H), 2.13 (m, 1 H), 0.84-1.21 (m, 18 H).

[0957] 31P-NMR (DMSO-d6, 162 MHz) δ[ppm]: 148.5, 148.3.

### 21c: N-[9-[(2R,6R)-6-[[bis(4-methoxyphenyl)-phenyl-methoxy]methyl]-6-[[2-cyanoethoxy-(diisopropylamino)phosphanyl]oxymethyl]-4-isopropyl-morpholin-2-yl]-6-oxo-1H-purin-2-yl]-2-methyl-propanamide

[0958] Following the protocol described for the synthesis of 16c (scheme 5), 40 mg (56 μmol) of the starting compound 20c gave 23 mg (44.9%) of the desired phosphoramidite 21c after silicagel chromatography (0 to 100% methyl-tert-butylether in n-heptane, column pre-conditioned with n-heptane+1% NEt₃).

[0959] LCMS-Method C:

[0960] UV-wavelength [nm]=220: Rₜ[min]=2.57

[0961] Ionization method: ES⁺: [M−NⁱPr₂+OH+H]⁺=828.2

[0962] 1H-NMR (DMSO-d6, 400 MHz) δ[ppm]: 11.70-12.30 (b s, 1 H), 11.53 (b s, 1 H), 8.05 (s, 1 H), 7.35-7.45 (m, 2 H), 7.20-7.33 (m, 7 H), 6.82-6.91 (m, 4 H), 5.54-5.68 (m, 1 H), 3.80-3.93 (m, 0.5 H), 3.73, 3.72 (2×s, 6 H), 3.68-3.76 (m, 1.5 H), 3.60-3.67 (m, 2 H), 3.35-3.60 (m, 4 H), 3.12 (m, 1 H), 2.57-2.98 (m, 7 H), 0.92-1.13 (m, 24 H).

[0963] 31P-NMR (DMSO-d6, 162 MHz) δ[ppm]: 147.6, 147.4.

### 21e: N-[9-[(2R,6R)-6-[[bis(4-methoxyphenyl)-phenyl-methoxy]methyl]-6-[[2-cyanoethoxy-(diisopropylamino)phosphanyl]oxymethyl]-4-isopropyl-morpholin-2-yl]purin-6-yl]benzamide

[0964] Starting with 950 mg (1.30 mmol) of 20e, the title compound was prepared following the protocol described for 16e (scheme 5), which gave 1.10 g (91.0%) of 21e as colourless foam.

[0965] 1H-NMR (DMSO-d6, 400 MHz) δ[ppm]: 11.19 (br s, 1 H), 8.73, 8.71 (2×s, 1 H), 8.63, 8.59 (2×s, 1 H), 8.04 (d, J=7.65 Hz, 2 H), 7.64 (t, J=7.34 Hz, 1 H), 7.55 (t, J=7.43 Hz, 2 H), 7.44 (d, J=7.78 Hz, 2 H), 7.21-7.35 (m, 7 H), 6.86-6.93 (m, 4 H), 5.89-5.99 (m, 1 H), 3.80-4.15 (m, 1 H), 3.74 (s, 6 H), 3.63-3.72 (m, 2 H), 3.31-3.60 (m, 5 H), 3.01 (br d, J=10.79 Hz, 1 H), 2.66-2.90 (m, 4 H), 2.59-2.64 (m, 1 H), 2.42-2.47 (m, 1 H), 0.91-1.12 (m, 18 H).

[0966] 31P-NMR (DMSO-d6, 162 MHz) δ[ppm]: 147.6, 147.5.

### 21f: N-[1-[(2R,6R)-6-[[bis(4-methoxyphenyl)-phenyl-methoxy]methyl]-6-[[2-cyanoethoxy-(diisopropylamino)phosphanyl]oxymethyl]-4-isopropyl-morpholin-2-yl]-2-oxo-pyrimidin-4-yl]benzamide

[0967] Starting with 620 mg (0.88 mmol) of 20f, the title compound was prepared following the protocol described for 16e (scheme 5), which gave 681 mg (85.5%) of 21f as colourless foam.

[0968] 1H-NMR (DMSO-d6, 400 MHz) δ[ppm]: 11.28 (br s, 1 H), 8.12-8.23 (2×d, J=7.47 Hz, 1 H), 8.01 (d, J=7.65 Hz, 2 H), 7.58-7.67 (m, 1 H), 7.51 (t, J=7.58 Hz, 2 H), 7.35-7.42 (m, 3 H), 7.20-7.35 (m, 7 H), 6.83-6.93 (m, 4 H), 5.71-5.80 (2×dd, J=9.49, 2.54 Hz, 1 H), 3.44-4.00 (m, 6 H), 3.74 (s, 6 H), 3.38 (m, 1 H), 3.24-3.33 (m, 1 H), 2.60-2.94 (m, 5 H), 2.33-2.48 (m, 1 H), 2.01-2.09 (m, 1 H), 1.02-1.23 (m, 12 H), 0.83-1.00 (m, 6 H).

[0969] 31P-NMR (DMSO-d6, 162 MHz) δ[ppm]: 147.5, 147.4.

[chemical structure]

### 22a: 1-[(2R,3R,4S,5S)-5-[[bis(4-methoxyphenyl)-phenyl-methoxy]methyl]-3,4-dihydroxy-5-(triisopropylsilyloxymethyl)tetrahydrofuran-2-yl]-5-methyl-pyrimidine-2,4-dione

[0970] To a solution of 23.7 g (53.4 mmol) of the starting compound 4a in 240 ml anhydrous pyridine were added 23.13 g (80 mmol) DMT-Cl at room temperature under N₂-atmosphere. After stirring for 12 h, the solvent was removed in vacuo and the residue was purified by silicagel column chromatography (PE/EtOAc 10:1 to 1:1), which gave 16.3 g, (41%) of the desired DMT-protected product 22a as colourless solid.

[0971] 1H-NMR (DMSO-d6, 400 MHz) δ[ppm]: 11.34 (s, 1 H), 7.50 (d, J=0.75 Hz, 1 H), 7.42-7.37 (m, 2 H), 7.32 (t, J=7.53 Hz, 2 H), 7.29-7.22 (m, 6 H), 6.90 (dd, J=8.91, 2.13 Hz, 4 H), 5.89 (d, J=7.28 Hz, 1 H), 5.45 (d, J=6.53 Hz, 1 H), 5.15 (d, J=5.02 Hz, 1 H), 4.48-4.39 (m, 1 H), 4.31 (t, J=5.14 Hz, 1 H), 3.86-3.80 (m, 1 H), 3.74 (s, 6 H), 1.28 (s, 3 H), 0.98-0.83 (m, 22 H).

### 22b: 1-[(2R,3R,4S,5S)-5-[[bis(4-methoxyphenyl)-phenyl-methoxy]methyl]-3,4-dihydroxy-5-(triisopropylsilyloxymethyl)tetrahydrofuran-2-yl]pyrimidine-2,4-dione

[0972] To a solution of compound 4b (75 g, 174 mmol) in 750 ml anhydrous pyridine was added DMT-Cl (70.8 g, 209 mmol) at room temperature under N₂-atmosphere. The mixture was stirred for 12 h to achieve complete conversion. The solvent was removed in vacuo, the residue was diluted with 500 ml of water and extracted with 3×500 ml EtOAc. The organic layers were washed with brine, dried over anhydrous Na₂SO₄, filtered and concentrated in vacuo. The obtained crude product was purified by flash chromatography on silicagel (PE/EtOAc 1:1 to EtOAc/MeOH 20:1) to give 80 g (62.6%) of 22b as a colourless foam.

[0973] 1H-NMR (DMSO-d6, 400 MHz) δ[ppm]: 11.35 (s, 1 H), 7.61 (d, J=8.28 Hz, 1 H), 7.42-7.36 (m, 2 H), 7.32 (t, J=7.65 Hz, 2 H), 7.28-7.19 (m, 5 H), 6.90 (d, J=8.03 Hz, 4 H), 5.83 (d, J=6.53 Hz, 1 H), 5.48 (d, J=6.02 Hz, 1 H), 5.27 (d, J=8.03 Hz, 1 H), 5.21 (d, J=5.27 Hz, 1 H), 4.33-4.26 (m, 1 H), 4.22 (q, J=6.02 Hz, 1 H), 3.89-3.79 (m, 2 H), 3.74 (s, 6 H), 3.24 (d, J=10.04 Hz, 1 H), 1.01-0.84 (m, 21 H).

### 22c: N-[9-[(2R,3R,4S,5S)-5-[[bis(4-methoxyphenyl)-phenyl-methoxy]methyl]-3,4-dihydroxy-5-(triisopropylsilyloxymethyl)tetrahydrofuran-2-yl]-6-oxo-1H-purin-2-yl]-2-methyl-propanamide

[0974] Following the protocol described for 22b, 55.8 g (103 mmol) of 4c were protected with DMT-Cl in pyridine, yielding 50.0 g (57.4%) of 22c as colourless solid.

[0975] 1H-NMR (DMSO-d6, 400 MHz) δ[ppm]: 12.12 (br s, 1 H), 11.67 (br s, 1 H), 7.99-7.83 (m, 1 H), 7.38 (br d, J=7.28 Hz, 2 H), 7.32-7.13 (m, 8 H), 6.84 (dd, J=8.78, 2.26 Hz, 4 H), 5.86 (d, J=7.03 Hz, 1 H), 5.70-5.45 (m, 1 H), 5.18 (br s, 1 H), 4.73-4.62 (m, 1 H), 4.25 (br d, J=4.77 Hz, 1 H), 3.97 (br d, J=10.29 Hz, 1 H), 3.84 (br d, J=10.29 Hz, 1 H), 3.73 (s, 6 H), 3.20 (br d, J=10.04 Hz, 1 H), 2.76 (dt, J=13.61, 6.87 Hz, 1 H), 1.12 (d, J=6.78 Hz, 6 H), 1.01-0.87 (m, 21 H).

### 22e: N-[9-[(2R,3R,4S,5S)-5-[[bis(4-methoxyphenyl)-phenyl-methoxy]methyl]-3,4-dihydroxy-5-(triisopropylsilyloxymethyl)tetrahydrofuran-2-yl]purin-6-yl]benzamide

[0976] Following the protocol described for 22b, 57.0 g (102 mmol) of 4e were protected with DMT-Cl in pyridine, yielding of 22e as colourless solid (70.0%).

[0977] 1H-NMR (DMSO-d6, 400 MHz) δ[ppm]: 11.22 (s, 1 H), 8.68-8.58 (m, 1 H), 8.49 (s, 1 H), 8.05 (d, J=7.28 Hz, 2 H), 7.70-7.60 (m, 1 H), 7.59-7.50 (m, 2 H), 7.43 (d, J=7.28 Hz, 2 H), 7.33-7.17 (m, 7 H), 6.86 (dd, J=8.91, 1.38 Hz, 4 H), 6.00 (d, J=7.28 Hz, 1 H), 5.53 (d, J=6.78 Hz, 1 H), 5.32 (d, J=4.89 Hz, 1 H), 5.00-4.87 (m, 1 H), 4.34 (t, J=4.89 Hz, 1 H), 4.08-4.04 (m, 1 H), 3.98 (d, J=10.79 Hz, 1 H), 3.73 (s, 6 H), 3.40 (d, J=9.54 Hz, 1 H), 3.30 (br d, J=9.54 Hz, 1 H), 1.12-0.93 (m, 21 H).

### 23a: 1-[(2R,6S)-6-[[bis(4-methoxyphenyl)-phenyl-methoxy]methyl]-3,5-dihydroxy-6-(triisopropylsilyloxymethyl)-1,4-dioxan-2-yl]-5-methyl-pyrimidine-2,4-dione

[0978] To a solution of 12.6 g (16.9 mmol) starting material 22a in 250 ml acetone/H₂O (3:1) was added dropwise an aqueous solution of 5.05 g (23.6 mmol) NaIO₄ in H₂O (60 ml) at room temperature. The mixture was stirred 12 h to reach complete conversion and was poured into 500 ml ice-water. The mixture was extracted 3× with 500 ml DCM. The organic layers were combined and washed with brine, dried over anhydrous Na₂SO₄, filtered and concentrated in vacuo to give 11.20 g (87%) of the desired product 23a as white foam, which was used in the next step without further purification.

[0979] 1H-NMR (DMSO-d6, 400 MHz) δ[ppm]: 11.62-11.33 (m, 1 H), 7.80-7.65 (m, 1 H), 7.57-7.38 (m, 3 H), 7.33-7.13 (m, 9 H), 6.88-6.73 (m, 5 H), 6.08-5.86 (m, 1 H), 5.71-5.51 (m, 1 H), 5.24-5.06 (m, 1 H), 5.01-4.94 (m, 1 H), 4.29-4.16 (m, 1 H), 3.75-3.70 (m, 7 H), 3.34-3.24 (m, 1 H), 3.06-2.81 (m, 1 H), 2.02-1.59 (m, 2 H), 1.03 (m, 1 H), 1.09-0.74 (m, 21 H).

### 23b: 1-[(2R,6S)-6-[[bis(4-methoxyphenyl)-phenyl-methoxy]methyl]-3,5-dihydroxy-6-(triisopropylsilyloxymethyl)-1,4-dioxan-2-yl]pyrimidine-2,4-dione

[0980] Following the protocol described for 23a, 77.0 g (105 mmol) of the diol 22b gave 80 g (quant., crude product) of the title compound 23b as yellow solid.

[0981] 1H-NMR (DMSO-d6, 400 MHz) δ[ppm]: 11.67-11.36 (m, 1 H), 7.87-7.77 (m, 1 H), 7.76-7.67 (m, 1 H), 7.55-7.41 (m, 2 H), 7.39-7.20 (m, 8 H), 6.94-6.81 (m, 4 H), 5.94-5.87 (m, 1 H), 5.78-5.63 (m, 1 H), 5.59-5.51 (m, 1 H), 5.25-5.08 (m, 1 H), 5.07-4.99 (m, 1 H), 4.32-4.20 (m, 1 H), 3.82-3.70 (m, 6 H), 3.34-3.26 (m, 1 H), 3.15-3.04 (m, 1 H), 2.95-2.86 (m, 1 H), 1.14-0.81 (m, 22 H).

### 23c: N-[9-[(2R,6S)-6-[[bis(4-methoxyphenyl)-phenyl-methoxy]methyl]-3,5-dihydroxy-6-(triisopropylsilyloxymethyl)-1,4-dioxan-2-yl]-6-oxo-1H-purin-2-yl]-2-methyl-propanamide

[0982] Following the protocol described for 23a, 50.0 g (59 mmol) of the diol 22c gave 47 g (96.1%, crude product) of the title compound 23c as yellow solid.

[0983] 1H-NMR (DMSO-d6, 400 MHz) δ[ppm]: 12.25-12.06 (m, 1 H), 11.78-11.55 (m, 1 H), 8.19 (d, J=8.78 Hz, 1 H), 7.44 (br d, J=7.28 Hz, 1 H), 7.38 (br d, J=6.53 Hz, 1 H), 7.34-7.14 (m, 10 H), 6.99 (d, J=6.78 Hz, 1 H), 6.90-6.71 (m, 5 H), 6.05-5.98 (m, 1 H), 5.74 (d, J=7.78 Hz, 1 H), 5.61-5.53 (m, 1 H), 5.48 (q, J=6.78 Hz, 1 H), 5.24-5.17 (m, 1 H), 5.06 (d, J=6.53 Hz, 1 H), 4.35-4.22 (m, 1 H), 3.83 (br d, J=11.54 Hz, 1 H), 3.72 (d, J=3.26 Hz, 7 H), 3.27 (br d, J=9.29 Hz, 1 H), 3.29-3.23 (m, 1 H), 3.12-3.04 (m, 1 H), 2.91-2.75 (m, 1 H), 1.22-0.76 (m, 29 H).

### 23e: N-[9-[(2R,6S)-6-[[bis(4-methoxyphenyl)-phenyl-methoxy]methyl]-3,5-dihydroxy-6-(triisopropylsilyloxymethyl)-1,4-dioxan-2-yl]purin-6-yl]benzamide

[0984] Following the protocol described for 23a, 78.0 g (90.6 mmol) of the diol 22e gave 75.2 g (94.6%, crude product) of the title compound 23e as white solid.

[0985] MS (m/z)=876.2 [M+H]⁺

### 24a: 1-[(2R,6S)-6-[[bis(4-methoxyphenyl)-phenyl-methoxy]methyl]-6-(triisopropylsilyloxymethyl)morpholin-2-yl]-5-methyl-pyrimidine-2,4-dione

[0986] To a solution of 2.6 g (3.4 mmol) starting compound 23a in 44 ml anhydrous MeOH were added 0.98 g (3.7 mmol) (NH₄)₂B₄O₇.4H₂O at room temperature under N₂-atmosphere. The mixture was stirred for 2 hours, followed by the addition of 0.45 g (6.8 mmol) AcOH, 5.0 g 4 Å molecular sieves and 0.47 g (6.8 mmol) NaBH₃CN. After stirring for 12 h at room temperature, TLC showed that the starting material was consumed completely. The solvent was removed in vacuo, and the residue purified by silicagel chromatography (PE/EtOAc 4:1 to 1:1), yielding 1.59 g (64%) of the desired morpholine 24a as a white foam.

[0987] MS (m/z)=752.5 [M+Na]⁺

[0988] 1H-NMR (DMSO-d6, 400 MHz) δ[ppm]: 11.39 (s, 1 H), 7.62 (s, 1 H), 7.43 (br d, J=7.28 Hz, 2 H), 7.33-7.23 (m, 8 H), 6.84 (d, J=8.78 Hz, 5 H), 5.86 (br dd, J=9.91, 2.64 Hz, 1 H), 5.89-5.81 (m, 1 H), 4.13 (br d, J=9.54 Hz, 1 H), 3.96 (br d, J=9.54 Hz, 1 H), 3.72 (d, J=0.75 Hz, 6 H), 3.06 (br d, J=9.29 Hz, 1 H), 2.97 (br d, J=9.03 Hz, 1 H), 2.93-2.78 (m, 2 H), 2.76-2.57 (m, 3 H), 1.76 (s, 3 H), 0.98-0.87 (m, 22 H).

### 24b: 1-[(2R,6S)-6-[[bis(4-methoxyphenyl)-phenyl-methoxy]methyl]-6-(triisopropylsilyloxymethyl)morpholin-2-yl]pyrimidine-2,4-dione

[0989] To a solution of compound 23b (5.0 g, 6.7 mmol) in 85 ml anhydrous MeOH was added (NH₄)₂B₄O₇.4H₂O (1.93 g, 7.6 mmol) at 25° C. under N₂-atmosphere. The mixture was stirred for 2 h, followed by the addition of 0.80 g (13.4 mmol) AcOH, 10 g 4 Å molecular sieves and 0.84 g (13.4 mmol) NaBH₃CN. After stirring for 12 h the mixture was filtered and the filtrate was concentrated in vacuo. The residue was diluted with ice-water and extracted with 3× with 50 ml EtOAc. The organic layers were combined and washed with brine, dried over anhydrous Na₂SO₄, filtered and concentrated in vacuo. The crude product was purified by column chromatography on silica gel (PE/EtOAc 10:1 to 1:1), yielding the title compound 24b as white foam (94%).

[0990] MS (m/z)=738.5 [M+H]⁺

[0991] 1H-NMR (DMSO-d6, 400 MHz) δ[ppm]: 11.44 (br s, 1 H), 7.75 (d, J=8.07 Hz, 1 H), 7.45 (br d, J=7.34 Hz, 2 H), 7.37-7.20 (m, 7 H), 6.89 (d, J=8.80 Hz, 4 H), 5.88 (br dd, J=10.03, 2.45 Hz, 1 H), 5.73 (d, J=8.07 Hz, 1 H), 4.17 (br d, J=9.78 Hz, 1 H), 4.11-4.02 (m, 2 H), 3.77 (d, J=0.73 Hz, 6 H), 3.12 (br d, J=9.05 Hz, 1 H), 3.02-2.83 (m, 3 H), 2.70-2.58 (m, 2 H), 1.06-0.90 (m, 21 H).

### 24c: N-[9-[(2R,6S)-6-[[bis(4-methoxyphenyl)-phenyl-methoxy]methyl]-6-(triisopropylsilyloxymethyl)morpholin-2-yl]-6-oxo-1H-purin-2-yl]-2-methyl-propanamide

[0992] Following the protocol described for 24b, 7.0 g (8.2 mmol) of the starting material 23c were converted to the morpholine compound 24c, which was isolated after silicagel chromatography (PE/EtOAc 5:1 to 1:1) as colourless foam (73.2%).

[0993] MS (m/z)=825.2 [M+H]⁺

[0994] 1H-NMR (DMSO-d6, 400 MHz) δ[ppm]: 12.12 (br s, 1 H), 11.59 (s, 1 H), 8.15 (s, 1 H), 7.40 (br d, J=7.03 Hz, 2 H), 7.30-7.12 (m, 7 H), 6.81 (br d, J=7.78 Hz, 4 H), 5.83 (dd, J=9.66, 3.14 Hz, 1 H), 4.23 (br d, J=9.03 Hz, 1 H), 3.92 (br d, J=9.03 Hz, 1 H), 3.72 (d, J=2.76 Hz, 6 H), 2.97-3.18 (m, 3 H), 2.96-2.86 (m, 2 H), 2.80 (dt, J=13.55, 6.78 Hz, 1 H), 2.67 (br d, J=12.05 Hz, 1 H), 1.13 (t, J=6.15 Hz, 6 H), 1.03-0.82 (m, 22 H).

### 24e: N-[9-[(2R,6S)-6-[[bis(4-methoxyphenyl)-phenyl-methoxy]methyl]-6-(triisopropylsilyloxymethyl)morpholin-2-yl]purin-6-yl]benzamide

[0995] Following the protocol described for 24b, 5.0 g (5.7 mmol) of the starting material 23e were converted to the morpholine compound 24e, which was isolated after silicagel chromatography (PE/EtOAc 1:4) as colourless foam (73.4%).

[0996] MS (m/z)=843.1 [M+H]⁺

[0997] 1H-NMR (DMSO-d6, 400 MHz) δ[ppm]: 11.22 (br s, 1 H), 8.75 (s, 1 H), 8.66 (s, 1 H), 8.05 (d, J=7.34 Hz, 2 H), 7.70-7.62 (m, 1 H), 7.60-7.51 (m, 2 H), 7.38 (br d, J=6.97 Hz, 2 H), 7.26-7.16 (m, 7 H), 6.78 (d, J=8.93 Hz, 4 H), 6.16 (dd, J=10.03, 2.81 Hz, 1 H), 4.26 (d, J=9.66 Hz, 1 H), 4.10-3.98 (m, 1 H), 3.71 (d, J=0.73 Hz, 6 H), 3.28 (br d, J=10.64 Hz, 1 H), 3.16 (br d, J=9.17 Hz, 1 H), 3.06 (br d, J=9.17 Hz, 1 H), 2.98-2.90 (m, 2 H), 2.79 (br d, J=12.47 Hz, 1 H), 1.10-0.82 (m, 21 H).

[chemical structure]

### 25: Tert-butyl (2S,6R)-2-[[bis(4-methoxyphenyl)-phenyl-methoxy]methyl]-6-(2,4-dioxo-pyrimidin-1-yl)-2-(triisopropylsilyloxymethyl)morpholine-4-carboxylate

[0998] To a mixture of the morpholine 24b (50 g, 69.8 mmol) and DIPEA (18 g, 139.7 mol) in 500 ml DCM was added Boc₂O (22.9 g, 104.8 mol) dropwise at room temperature. After stirring 24 h, the solvent was removed in vacuo and the residue was purified by column chromatography (PE/EtOAc 1:1) to give compound 25 (60 g, yield 93%) as white foam.

[0999] 1H-NMR (DMSO-d6, 400 MHz) δ[ppm]: 7.58 (d, J=8.0 Hz, 1 H), 7.45 (d, J=7.2 Hz, 2 H), 7.33-7.26 (m, 7 H), 6.85-6.81 (m, 4 H), 6.02-5.98 (dd, J=10.0 3.6 Hz, 1 H), 5.77 (d, J=8.0 Hz, 1 H), 4.24-4.11 (m, 2 H), 3.99 (d, J=9.6 Hz, 1 H), 3.80 (s, 1 H), 3.75 (m, 1 H), 3.28-3.20 (m, 2 H), 3.08 (d, J=12.8 Hz, 1 H), 2.69 (t, J=11.4 Hz, 1 H), 1.48 (m, 9 H), 1.03-0.95 (m, 21 H).

### 26: Tert-butyl (2S,6R)-2-[[bis(4-methoxyphenyl)-phenyl-methoxy]methyl]-6-[2-oxo-4-(1,2,4-triazol-1-yl)pyrimidin-1-yl]-2-(triisopropylsilyloxymethyl)morpholine-4-carboxylate

[1000] To a mixture of 1H-1,2,4-triazole (65 g, 0.94 mol) in 650 ml ACN was added POCl₃ (49.79 g, 0.31 mol) dropwise at 30° C. After cooling to 0° C., DIPEA (198 g, 1.53 mol) was added dropwise and stirring was continued at 0° C. for 30 min. At the same temperature the starting material 25 (32 g, 39.21 mmol) was added to the mixture in one portion, the ice-bath was removed and the reaction was stirred at 30° C. for 3 h. The mixture was poured into 3 l of a mixed solvent of EtOAc/water (1:2). After separation, the organic layer was washed with 500 ml sat. NaHCO₃-solution and brine, dried over anhydrous Na₂SO₄, filtered and concentrated in vacuo to give crude compound 26 (40 g) as yellow oil, which was used for the next step without further purification.

[1001] MS (m/z)=867.5 [M+H]⁺

### 27: Tert-butyl-(2S,6R)-6-(4-benzamido-2-oxo-pyrimidin-1-yl)-2-[[bis(4-methoxyphenyl)-phenyl-methoxy]methyl]-2-(triisopropylsilyloxymethyl)morpholine-4-carboxylate

[1002] To a mixture of benzamide (38 g, 0.31 mol) in 380 ml dioxane was added NaH (12.8 g, 0.31 mol) in portions at 0° C. After stirring at 30° C. for 30 min, triazole 26 (40 g, 39.21 mmol, crude) was added in one portion and the mixture was stirred at 30° C. for 1 h. The reaction was quenched with 24 l of sat. NH₄Cl-solution and extracted with 3 l EtOAc. The organic layer was washed with 2 l water and brine, dried over anhydrous Na₂SO₄, filtered and concentrated in vacuo to give 54 g of crude compound as yellow oil. Final silicagel chromatography (PE/EtOAc 2:1) gave 20.4 g (56.6%) of 27 as yellow foam.

[1003] 1H-NMR (DMSO-d6, 400 MHz) δ[ppm]: 11.31 (br s, 1 H), 8.20 (br d, J=7.21 Hz, 1 H), 8.01 (br d, J=7.46 Hz, 2 H), 7.70-7.59 (m, 1 H), 7.58-7.48 (m, 2 H), 7.47-7.36 (m, 3 H), 7.34-7.16 (m, 7 H), 6.87 (br d, J=7.70 Hz, 4 H), 5.96 (br dd, J=10.09, 2.63 Hz, 1 H), 4.12 (br d, J=11.25 Hz, 1 H), 4.00-3.83 (m, 3 H), 3.74 (s, 6 H), 3.28-3.16 (m, 2 H), 3.06 (br d, J=9.17 Hz, 2 H), 1.55-1.32 (m, 9 H), 1.11-0.80 (m, 21 H).

### 28: N-[1-[(2R,6S)-6-(hydroxymethyl)-6-(triisopropylsilyloxymethyl)morpholin-2-yl]-2-oxo-pyrimidin-4-yl]benzamide

[1004] To a solution of 27 (13.5 g, 14.70 mmol) in 93 ml DCM were added 31 ml of TFA dropwise at 0° C. The reaction was stirred at 30° C. for 16 h. After neutralization with sat. NaHCO₃-solution to pH=7-8, the organic layer was separated and the aqueous phase extracted 2× with 100 ml DCM. The combined organic layers were dried over anhydrous Na₂SO₄, filtered and concentrated in vacuo. The residue was purified by column chromatography (EtOAc/EtOH=30:1) to give 28 (2.7 g, yield 35.6%) as yellow foam and the corresponding trifluoro-aceticacidester as a side product (4.78 g, 53.1%) which was dissolved in a mixed solvent of 186 ml THF and 62 ml EtOH. At 0° C. 75.8 ml of a 1 M aqueous NaOH-solution were added. After stirring for 2 min, the solution was neutralized with sat. citric acid solution, diluted with 300 ml H₂O and extracted with 300 ml EtOAc. The organic layer was washed with brine, dried with Na₂SO₄ and evaporated. Purification by silicagel chromatography (EtOAc/EtOH 30:1) gave 5.2 g (68.5%) of 28 as white solid.

[1005] MS (m/z)=517.4 [M+H⁺]⁺

[1006] 1H-NMR (DMSO-d6, 400 MHz) δ[ppm]: 11.26 (br s, 1 H), 8.28 (d, J=7.53 Hz, 1 H), 8.01 (d, J=7.28 Hz, 2 H), 7.67-7.58 (m, 1 H), 7.57-7.47 (m, 2 H), 7.34 (d, J=7.40 Hz, 1 H), 5.86 (dd, J=9.66, 2.64 Hz, 1 H), 4.64 (br s, 1 H), 4.01-3.90 (m, 2 H), 3.46 (br s, 2 H), 3.05 (dd, J=11.98, 2.57 Hz, 1 H), 3.11-3.00 (m, 1 H), 2.87-2.75 (m, 1 H), 2.74-2.63 (m, 1 H), 2.40-2.27 (m, 1 H), 1.15-0.99 (m, 21 H).

### 29: 9H-fluoren-9-ylmethyl (2S,6R)-6-(4-benzamido-2-oxo-pyrimidin-1-yl)-2-(hydroxymethyl)-2-(triisopropylsilyloxymethyl)morpholine-4-carboxylate

[1007] To a solution of 7.0 g (13.55 mmol) of the morpholine 28 (13.55 mmol) in 70 ml in DMF were added 5.5 g (16.26 mmol) Fmoc-N-hydroxy-succinimide ester in portions at 0° C. After stirring for 16 h, the solution was poured into 100 ml of water and extracted 3× with 30 ml EtOAc. The combined organic layers were washed with brine, dried over anhydrous Na₂SO₄, filtered and concentrated in vacuo. Final purification on silica (PE/EtOAc 1:2) yielded 10.0 g (quant.) of compound 29 as yellow solid.

[1008] MS (m/z)=739.4 [M+H]⁺

[1009] 1H-NMR (DMSO-d6, 400 MHz) δ[ppm]: 11.26 (br s, 1 H), 8.33 (br s, 1 H), 8.02 (br d, J=7.46 Hz, 2 H), 7.90 (d, J=7.58 Hz, 2 H), 7.64 (br t, J=7.40 Hz, 3 H), 7.57-7.49 (m, 2 H), 7.48-7.40 (m, 3 H), 7.39-7.30 (m, 2 H), 6.11-5.79 (m, 1 H), 4.98 (t, J=6.05 Hz, 1 H), 4.52-4.12 (m, 4 H), 3.89-3.69 (m, 2 H), 3.54 (br s, 3 H), 3.21-3.07 (m, 1 H), 3.04-2.77 (m, 1 H), 1.11-0.89 (m, 21 H).

### 30: 9H-fluoren-9-ylmethyl-(2S,6R)-6-(4-benzamido-2-oxo-pyrimidin-1-yl)-2-[[bis(4-methoxyphenyl)-phenyl-methoxy]methyl]-2-(triisopropylsilyloxymethyl)morpholine-4-carboxylate

[1010] To a solution of compound 29 (13.9 g, 18.83 mmol) in 140 ml pyridine were added 12.75 g (37.62 mmol) DMT-Cl at 25° C. The mixture was stirred at 25° C. for 16 h to achieve complete conversion. After evaporation of the solvent, the residue was dissolved in 200 ml EtOAc, washed with 100 ml water and brine. The organic phase was dried with Na₂SO₄, filtered and concentrated in vacuo. The residue was purified by column chromatography (PE/EtOAc 1:1) yielding 17.3 g (88.1%) of compound 30 as yellow foam.

[1011] 1H-NMR (DMSO-d6, 400 MHz) δ[ppm]: 11.32 (br s, 1 H), 8.21 (br s, 1 H), 8.02 (br d, J=7.58 Hz, 2 H), 7.88 (br s, 2 H), 7.76-7.60 (m, 3 H), 7.59-7.50 (m, 2 H), 7.42 (br d, J=7.21 Hz, 5 H), 7.38-7.19 (m, 9 H), 6.89 (br d, J=8.44 Hz, 4 H), 6.19-5.85 (m, 1 H), 4.28 (br s, 4 H), 3.91 (br d, J=8.80 Hz, 2 H), 3.75 (s, 6 H), 3.23 (br s, 1 H), 3.10 (br d, J=9.05 Hz, 3 H), 1.06-0.78 (m, 21 H).

### 24f: N-[1-[(2R,6S)-6-[[bis(4-methoxyphenyl)-phenyl-methoxy]methyl]-6-(triisopropylsilyloxymethyl)morpholin-2-yl]-2-oxo-pyrimidin-4-yl]benzamide

[1012] To a solution of 8.4 g (8.07 mmol) of 30 in 85 ml DCM were added 17 ml piperidine at room temperature. After complete conversion (approx. 20 min), the reaction solution was washed with sat. NH₄Cl-solution. The aqueous phase was extracted with DCM and the combined organic layers were dried with Na₂SO₄, filtered and in vacuo. The crude product was purified by column chromatography (PE/EtOAc 1:4), yielding 4.7 g (71.2%) of the title compound 24f as white foam.

[1013] MS (m/z)=819.4 [M+H]⁺

[1014] 1H-NMR (DMSO-d6, 400 MHz) δ[ppm]: 11.31 (br s, 1 H), 8.18 (d, J=7.58 Hz, 1 H), 8.01 (br d, J=7.34 Hz, 2 H), 7.67-7.58 (m, 1 H), 7.57-7.47 (m, 2 H), 7.42 (br d, J=7.46 Hz, 3 H), 7.34-7.15 (m, 7 H), 6.86 (br d, J=8.56 Hz, 4 H), 6.04-5.89 (m, 1 H), 4.18 (br d, J=9.54 Hz, 1 H), 4.07 (br d, J=9.54 Hz, 1 H), 3.73 (d, J=1.34 Hz, 6 H), 3.15 (br d, J=9.17 Hz, 1 H), 3.05 (br d, J=10.15 Hz, 1 H), 2.97 (br d, J=9.17 Hz, 1 H), 2.88 (br d, J=12.47 Hz, 1 H), 2.62 (br d, J=12.47 Hz, 1 H), 2.46 (br s, 1 H), 1.08-0.83 (m, 21 H).

[chemical structure]

[1015] General procedure A for the reductive amination reaction to prepare compounds 31a-31f 1.0 g (1.4 mmol) of the morpholine 24a was dissolved in 25 ml MeOH followed by the addition of 2.0 g moleculare sieves (4 Å), 560 mg (769 μl, 5.5 mmol) NEt₃, 827 mg (789 μl, 13.7 mmol) AcOH and 1.0 to 3.0 equivalents of the corresponding aldehyde or ketone. After stirring for 15 minutes, 344 mg (5.5 mmol) sodium cyanoboronhydride were added in four portions every 30 minutes and the reaction was stirred at room temperature for 6 h. After standing overnight, the mixture was filtered and the filtrate was diluted with 25 ml sat. NaHCO₃-solution. The MeOH was evaporated and the aqueous phase was extracted with 50 ml DCM/iPrOH (5:1). After another filtration, the organic phase was separated, dried with MgSO₄ and evaporated. The obtained crude product was used in the next step without further purification.

### 31a: 1-[(2R,6S)-6-[[bis(4-methoxyphenyl)-phenyl-methoxy]methyl]-4-methyl-6-(triiso-propylsilyloxymethyl)morpholin-2-yl]-5-methyl-pyrimidine-2,4-dione

[1016] Following general procedure A, using 3.0 equivalents of formaldehye (37% aqueous solution), 1.0 g of the title compound 31a was isolated as crude product and used without further purification.

[1017] LCMS-Method A:

[1018] UV-wavelength [nm]=220: Rₜ[min]=2.29

[1019] Ionization method: ES⁺: [M+H]⁺=744.3

### 31b: 1-[(2R,6S)-6-[[bis(4-methoxyphenyl)-phenyl-methoxy]methyl]-4-butyl-6-(triiso-propylsilyloxymethyl)morpholin-2-yl]-5-methyl-pyrimidine-2,4-dione

[1020] Following general procedure A, using 2.0 equivalents of butyraldehyde, 1.19 g of the title compound 31b were isolated as crude product and used without further purification.

[1021] LCMS-Method A:

[1022] UV-wavelength [nm]=220: Rₜ[min]=2.41

[1023] Ionization method: ES⁺: [M+H]⁺=786.7

### 31c: 1-[(2R,6S)-6-[[bis(4-methoxyphenyl)-phenyl-methoxy]methyl]-4-octyl-6-(triiso-propylsilyloxymethyl)morpholin-2-yl]-5-methyl-pyrimidine-2,4-dione

[1024] Following general procedure A, using 2.0 equivalents of octanal, 1.35 g of the title compound 31c were isolated as crude product and used without further purification.

[1025] LCMS-Method A:

[1026] UV-wavelength [nm]=220: Rₜ[min]=2.66

[1027] Ionization method: ES⁺: [M+H]⁺=842.7

### 31d: 1-[(2R,6S)-6-[[bis(4-methoxyphenyl)-phenyl-methoxy]methyl]-4-hexadecyl-6-(triisopropylsilyloxymethyl)morpholin-2-yl]-5-methyl-pyrimidine-2,4-dione

[1028] Following general procedure A, using 1.0 equivalent of hexadecanal, 1.58 g of the title compound 31d were isolated as crude product and used without further purification.

### 31e: 1-[(2R,6S)-6-[[bis(4-methoxyphenyl)-phenyl-methoxy]methyl]-4-cyclohexyl-6-(triisopropylsilyloxymethyl)morpholin-2-yl]-5-methyl-pyrimidine-2,4-dione

[1029] Following general procedure A, using 1.25 equivalents of cyclohexanone, 1.14 g of the title compound 31e were isolated as crude product and used without further purification.

[1030] LCMS-Method A:

[1031] UV-wavelength [nm]=220: Rₜ[min]=2.45

[1032] Ionization method: ES⁺: [M+H]⁺=812.5

### 31f: 1-[(2R,6S)-4-benzyl-6-[[bis(4-methoxyphenyl)-phenyl-methoxy]methyl]-6-(triisopropylsilyloxymethyl)morpholin-2-yl]-5-methyl-pyrimidine-2,4-dione

[1033] Following general procedure A, using 1.25 equivalents of benzaldehyde, 1.12 g of the title compound 31f were isolated as crude product and used without further purification.

[1034] LCMS-Method A:

[1035] UV-wavelength [nm]=220: Rₜ[min]=2.37

[1036] Ionization method: ES⁺: [M+H]⁺=821.4

### 31g: 1-[(2R,6S)-4-acetyl-6-[[bis (4-methoxyphenyl)-phenyl-methoxy]methyl]-6-(triiso-propylsilyloxymethyl)morpholin-2-yl]-5-methyl-pyrimidine-2,4-dione

[1037] 1.0 g (1.4 mmol) of the starting compound 24a were dissolved in 25 ml DCM. After adding 103 mg (99 μl, 1.7 mmol) AcOH, 779 mg (2.1 mmol) HBTU and 903 mg (1.19 ml, 6.9 mmol) diisopropyl-ethylamine, the reaction mixture was stirred for 4 h at room temperature to achieve complete conversion. The reaction solution was washed with 25 ml H₂O and the organic layer was separated. After drying with MgSO₄, the solvent was evaporated and the crude product was purified by silicagel chromatography (0 to 5% MeOH in DCM), yielding 1.06 g (quant.) of the title compound 31g.

[1038] LCMS-Method A:

[1039] UV-wavelength [nm]=220: Rₜ[min]=2.20

[1040] Ionization method: ES⁻: [M−H]⁻=770.2

### 31h: 1-[(2R,6S)-6-[[bis(4-methoxyphenyl)-phenyl-methoxy]methyl]-4-hexadecanoyl-6-(triisopropylsilyloxymethyl)morpholin-2-yl]-5-methyl-pyrimidine-2,4-dione

[1041] Following the protocol for 31g, 1.0 g (1.4 mmol) of the starting compound 24a and palmitic acid were converted to 1.14 g (86%) of the title compound 31h after silicagel chromatography (0 to 20% MeOH in DCM).

[1042] General procedure B for the desilylation reaction to prepare compounds 32a-32h

[1043] The crude products 31a-31h were dissolved in 12 ml NMP. After the addition of 2.1 g (2.9 ml, 20.6 mmol) NEt₃ and 1.14 g (1.15 ml, 6.9 mmol) NEt₃.3 HF, the reaction mixture was stirred for 2 hours at 90° C. After cooling down to room temperature, the solution was poured into sat. NaHCO₃-solution and extracted twice with EtOAc. The organic layers were dried with MgSO₄ and evaporated. The residue was dissolved in acetonitril/H₂O and lyophillized. The obtained crude products were purified by silicagel chromatography, which gave the desired compounds 32a-32h.

### 32a: 1-[(2R,6R)-6-[[bis(4-methoxyphenyl)-phenyl-methoxy]methyl]-6-(hydroxymethyl)-4-methyl-morpholin-2-yl]-5-methyl-pyrimidine-2,4-dione

[1044] Following general procedure B starting with crude product 31a, final silicagel purification (0 to 5% MeOH in DCM) delivered 543 mg (66.0%, two steps) of the title compound 32a.

[1045] LCMS-Method A:

[1046] UV-wavelength [nm]=220: Rₜ[min]=1.59

[1047] Ionization method: ES⁺: [M+H]⁺=588.3

[1048] 1H-NMR (DMSO-d6, 400 MHz) δ[ppm]: 11.37 (s, 1 H), 7.52 (s, 1 H), 7.40 (d, J=7.46 Hz, 2 H), 7.19-7.32 (m, 7 H), 6.87 (d, J=8.80 Hz, 4 H), 5.85 (dd, J=9.78, 2.93 Hz, 1 H), 4.63 (t, J=5.32 Hz, 1 H), 3.70-3.78 (m, 7 H), 3.65 (m, 1 H), 2.96-3.06 (m, 2 H), 2.81 (br d, J=9.29 Hz, 1 H), 2.63-2.74 (m, 1 H), 2.21 (s, 3 H), 2.06-2.16 (m, 1 H), 1.97-2.04 (m, 1 H), 1.67 (s, 3 H).

### 32b: 1-[(2R,6R)-6-[[bis(4-methoxyphenyl)-phenyl-methoxy]methyl]-4-butyl-6-(hydroxymethyl)morpholin-2-yl]-5-methyl-pyrimidine-2,4-dione

[1049] Following general procedure B starting with crude product 31b, final silicagel purification (0 to 5% MeOH in DCM) delivered 753 mg (85.5%, two steps) of the title compound 32b.

[1050] LCMS-Method A:

[1051] UV-wavelength [nm]=220: Rₜ[min]=1.75

[1052] Ionization method: ES⁺: [M+H]⁺=630.3

[1053] 1H-NMR (DMSO-d6, 400 MHz) δ[ppm]: 11.36 (s, 1 H), 7.54 (s, 1 H), 7.40 (d, J=7.46 Hz, 2 H), 7.20-7.34 (m, 7 H), 6.87 (d, J=8.68 Hz, 4 H), 5.85 (dd, J=9.66, 2.93 Hz, 1 H), 4.62 (t, J=5.14 Hz, 1 H), 3.70-3.78 (m, 7 H), 3.65 (m, 1 H), 2.96-3.09 (m, 2 H), 2.86 (br d, J=9.05 Hz, 1 H), 2.71-2.80 (m, 1 H), 2.31 (br t, J=7.15 Hz, 2 H), 1.99-2.22 (m, 2 H), 1.67 (s, 3 H), 1.20-1.45 (m, 4 H), 0.88 (m, 3 H).

### 32c: 1-[(2R,6R)-6-[[bis(4-methoxyphenyl)-phenyl-methoxy]methyl]-6-(hydroxymethyl)-4-octyl-morpholin-2-yl]-5-methyl-pyrimidine-2,4-dione

[1054] Following general procedure B starting with crude product 31c, final silicagel purification (0 to 5% MeOH in DCM) delivered 751 mg (78.2%, two steps) of the title compound 32c.

[1055] LCMS-Method A:

[1056] UV-wavelength [nm]=220: Rₜ[min]=1.99

[1057] Ionization method: ES⁺: [M+H]⁺=686.4

[1058] 1H-NMR (DMSO-d6, 400 MHz) δ[ppm]: 11.36 (b s, 1 H), 7.54 (s, 1 H), 7.40 (d, J=7.34 Hz, 2 H), 7.19-7.34 (m, 7 H), 6.87 (d, J=8.68 Hz, 4 H), 5.84 (dd, J=9.72, 2.87 Hz, 1 H), 4.61 (t, J=5.14 Hz, 1 H), 3.69-3.82 (m, 7 H), 3.64 (m, 1 H), 2.97-3.14 (m, 2 H), 2.82-2.91 (m, 1 H), 2.70-2.76 (m, 1 H), 2.30 (br t, J=7.09 Hz, 2 H), 1.98-2.21 (m, 2 H), 1.67 (s, 3 H), 1.33-1.46 (m, 2 H), 1.26 (m, 10 H), 0.81-0.92 (m, 3 H).

### 32d: 1-[(2R,6R)-6-[[bis(4-methoxyphenyl)-phenyl-methoxy]methyl]-4-hexadecyl-6-(hydroxymethyl)morpholin-2-yl]-5-methyl-pyrimidine-2,4-dione

[1059] Following general procedure B starting with crude product 31d, final silicagel purification (0 to 5% MeOH in DCM) delivered 677 mg (60.6%, two steps) of the title compound 32d.

[1060] LCMS-Method A:

[1061] UV-wavelength [nm]=220: Rₜ[min]=2.44

[1062] Ionization method: ES⁺: [M+H]⁺=798.5

[1063] 1H-NMR (DMSO-d6, 400 MHz) δ[ppm]: 11.36 (s, 1 H), 7.54 (s, 1 H), 7.40 (d, J=7.46 Hz, 2 H), 7.18-7.34 (m, 7 H), 6.86 (m, 4 H), 5.84 (m, 1 H), 4.61 (m, 1 H), 3.69-3.80 (m, 7 H), 3.64 (m, 1 H), 2.97-3.07 (m, 2 H), 2.85 (br d, J=8.80 Hz, 1 H), 2.68-2.77 (m, 1 H), 2.24-2.35 (m, 2 H), 1.99-2.20 (m, 2 H), 1.67 (s, 3 H), 1.35-1.46 (m, 2 H), 1.23 (s, 26 H), 0.82-0.88 (m, 3 H).

### 32e: 1-[(2R,6R)-6-[[bis(4-methoxyphenyl)-phenyl-methoxy]methyl]-4-cyclohexyl-6-(hydroxymethyl)morpholin-2-yl]-5-methyl-pyrimidine-2,4-dione

[1064] Following general procedure B starting with crude product 31e, final silicagel purification (0 to 5% MeOH in DCM) delivered 701 mg (76.4%, two steps) of the title compound 32e.

[1065] LCMS-Method A:

[1066] UV-wavelength [nm]=220: Rₜ[min]=1.75

[1067] Ionization method: ES⁺: [M+H]⁺=656.4

[1068] 1H-NMR (DMSO-d6, 400 MHz) δ[ppm]: 11.35 (s, 1 H), 7.55 (s, 1 H), 7.40 (d, J=7.46 Hz, 2 H), 7.18-7.33 (m, 7 H), 6.87 (d, J=8.93 Hz, 4 H), 5.81 (m, 1 H), 4.59 (t, J=5.20 Hz, 1 H), 3.72-3.78 (m, 7 H), 3.66 (m, 1 H), 3.03 (m, 2 H), 2.84 (br d, J=9.41 Hz, 1 H), 2.66-2.73 (m, 1 H), 2.23-2.39 (m, 3 H), 1.64-1.78 (m, 4 H), 1.68 (s, 3 H), 0.99-1.27 (m, 6 H).

### 32f: 1-[(2R,6R)-4-benzyl-6-[[bis(4-methoxyphenyl)-phenyl-methoxy]methyl]-6-(hydroxy-methyl)morpholin-2-yl]-5-methyl-pyrimidine-2,4-dione

[1069] Following general procedure B starting with crude product 31f, final silicagel purification (0 to 5% MeOH in DCM) delivered 591 mg (63.6%, two steps) of the title compound 32f.

[1070] LCMS-Method A:

[1071] UV-wavelength [nm]=220: Rₜ[min]=1.94

[1072] Ionization method: ES⁺: [M+H]⁺=664.3

[1073] 1H-NMR (DMSO-d6, 400 MHz) δ[ppm]: 11.33 (s, 1 H), 7.52 (s, 1 H), 7.18-7.39 (m, 14 H), 6.86 (d, J=8.80 Hz, 4 H), 5.86 (dd, J=9.66, 2.93 Hz, 1 H), 4.62 (t, J=5.20 Hz, 1 H), 3.83 (dd, J=10.94, 4.46 Hz, 1 H), 3.73 (s, 6 H), 3.66 (dd, J=11.00, 5.99 Hz, 1 H), 3.47-3.61 (m, 2 H), 3.01 (s, 2 H), 2.72-2.84 (m, 2 H), 2.22-2.31 (m, 1 H), 2.14-2.21 (m, 1 H), 1.66 (s, 3 H).

### 32g: 1-[(2R,6R)-4-acetyl-6-[[bis(4-methoxyphenyl)-phenyl-methoxy]methyl]-6-(hydroxy-methyl)morpholin-2-yl]-5-methyl-pyrimidine-2,4-dione

[1074] Following general procedure B starting with crude product 31g, final silicagel purification (0 to 5% MeOH in DCM) delivered 600 mg (69.6%, two steps) of the title compound 32g.

[1075] LCMS-Method A:

[1076] UV-wavelength [nm]=220: Rₜ[min]=1.77

[1077] Ionization method: ES⁻: [M−H]⁻=614.2

[1078] 1H-NMR (DMSO-d6, 400 MHz) δ[ppm]: 11.43 (s, 1 H), 7.64 (s, 0.65 H), 7.58 (s, 0.35 H), 7.36-7.47 (m, 2 H), 7.20-7.33 (m, 7 H), 6.84-6.91 (m, 4 H), 5.88 (dd, J=10.58, 2.75 Hz, 0.35 H), 5.74-5.80 (m, 0.65 H), 5.00 (t, J=4.40 Hz, 0.65 H), 4.63 (t, J=4.83 Hz, 0.35 H), 4.39 (br d, J=10.88 Hz, 0.65 H), 4.22 (br d, J=13.33 Hz, 0.35 H), 3.89 (m, 0.35 H), 3.74 (s, 6.65 H), 3.42-3.65 (m, 2 H), 3.35-3.41 (m, 1 H), 3.00-3.12 (m, 2 H), 2.83-2.98 (m, 1 H), 2.03 (m, 3 H), 1.73 (s, 3 H).

### 32h: 1-[(2R,6R)-6-[[bis(4-methoxyphenyl)-phenyl-methoxy]methyl]-4-hexadecanoyl-6-(hydroxymethyl)morpholin-2-yl]-5-methyl-pyrimidine-2,4-dione

[1079] Following general procedure B starting with crude product 31h, final silicagel purification (0 to 5% MeOH in DCM) delivered 874 mg (76.9%, two steps) of the title compound 32h.

[1080] LCMS-Method A:

[1081] UV-wavelength [nm]=220: Rₜ[min]=2.33

[1082] Ionization method: ES⁺: [M+H]⁺=304.3 (DMT⁺)

[1083] 1H-NMR (DMSO-d6, 400 MHz) δ[ppm]: 11.42 (br s, 1 H), 7.61, 7.57 (2×s, 1 H), 7.41 (m, 2 H), 7.20-7.34 (m, 7 H), 6.87 (m, 4 H), 5.84 (m, 0.5 H) 5.77 (m, 0.5 H), 4.95 (m, 0.5 H), 4.64 (m, 0.5 H), 4.40 (m, 0.5 H), 4.24 (m, 0.5 H), 3.95 (m, 0.5 H), 3.69-3.84 (m, 0.5 H), 3.74 (s, 6 H), 3.41-3.62 (m, 2 H), 3.00-3.15 (m, 2 H), 2.22-2.40 (m, 2 H), 1.72 (s, 3 H), 1.47 (br s, 2 H), 1.23 (br s, 26 H), 0.82-0.90 (m, 3 H).

[1084] General procedure C for the preparation of phosphoramidites 33a-33h

[1085] The starting material 32a-32h (1.0 mmol) and diisopropylammonium tetrazolide (3.0 mmol) were dissolved in 25 ml dry DCM. After adding 2-cyanoethyl N,N,N′,N′-tetraisopropyl-phosphorodiamidite (1.5 mmol), the solution was stirred under an Ar-atmosphere at room temperature. After 1.5 hours, the reaction solution was washed with 50 ml H₂O. The layers were separated and the aquoues phase was extracted with DCM. The combined organic layers were dried with MgSO₄ and evaporated. The crude products were purified by silicagel chromatography (0 to 100% methyl-tert.-butylether in n-heptane, column preconditioned with n-heptane+1% NEt₃), yielding the final phosphoroamidites 33a-33h.

### 33a: 3-[[(2S,6R)-2-[[bis(4-methoxyphenyl)-phenyl-methoxy]methyl]-4-methyl-6-(5-methyl-2,4-dioxo-pyrimidin-1-yl)morpholin-2-yl]methoxy-(diisopropylamino)phosphanyl]oxy-propanenitrile

[1086] Following general procedure C, 32a (540 mg, 0.92 mmol) was converted to the title compound 33a, which was isolated as colourless foam (568 mg, 78.5%).

[1087] 1H-NMR (DMSO-d6, 400 MHz) δ[ppm]: 11.35 (br s, 1 H), 7.54, 7.52 (2×s, 1 H), 7.35-7.44 (m, 2 H), 7.20-7.32 (m, 7 H), 6.86 (d, J=8.85 Hz, 4 H), 5.90 (m, 1 H), 4.02 (m, 1 H), 3.79-3.92 (m, 1 H), 3.73 (s, 6 H), 3.39-3.64 (m, 4 H), 2.98-3.12 (m, 2 H), 2.66-2.84 (m, 3 H), 2.53-2.64 (m, 1 H), 2.23, 2.21 (2×s, 3 H), 1.99-2.18 (m, 2 H), 1.72, 1.69 (2×s, 3 H), 0.91-1.12 (m, 12 H).

[1088] 31P-NMR (DMSO-d6, 162 MHz) δ[ppm]: 147.9, 147.7.

### 33b: 3-[[(2S,6R)-2-[[bis(4-methoxyphenyl)-phenyl-methoxy]methyl]-4-butyl-6-(5-methyl-2,4-dioxo-pyrimidin-1-yl)morpholin-2-yl]methoxy-(diisopropylamino)phosphanyl]oxy-propanenitrile

[1089] Following general procedure C, 32b (750 mg, 0.98 mmol) was converted to the title compound 33b, which was isolated as colourless foam (569 mg, 70.2%).

[1090] 1H-NMR (DMSO-d6, 400 MHz) δ[ppm]: 11.36 (br s, 1 H), 7.57, 7.54 (2×s, 1 H), 7.35-7.44 (m, 2 H), 7.20-7.32 (m, 7 H), 6.86 (d, J=8.78 Hz, 4 H), 5.90 (m, 1 H), 3.83-4.01 (m, 2 H), 3.73 (s, 6 H), 3.53-3.64 (m, 2 H), 3.39-3.52 (m, 2 H), 3.06-3.15 (m, 1 H), 2.96-3.05 (m, 1 H), 2.73-2.90 (m, 2 H), 2.63-2.70 (m, 1 H), 2.59 (m, 1 H), 2.24-2.48 (m, 2 H), 1.99-2.19 (m, 2 H), 1.73, 1.70 (2×s, 3 H), 1.27-1.42 (m, 4 H), 0.95-1.18 (m, 12 H), 0.87 (m, 3 H).

[1091] 31P-NMR (DMSO-d6, 162 MHz) δ[ppm]: 147.4, 147.0.

### 33c: 3-[[(2S,6R)-2-[[bis(4-methoxyphenyl)-phenyl-methoxy]methyl]-6-(5-methyl-2,4-dioxo-pyrimidin-1-yl)-4-octyl-morpholin-2-yl]methoxydiisopropylamino)phosphanyl]oxy-propanenitrile

[1092] Following general procedure C, 32c (745 mg, 1.0 mmol) was converted to the title compound 33c, which was isolated as colourless foam (537 mg, 60.6%).

[1093] 1H-NMR (DMSO-d6, 400 MHz) δ[ppm]: 11.37, 11.36 (2×s, 1 H), 7.56, 7.53 (2×s, 1 H), 7.40 (m, 2 H), 7.20-7.31 (m, 7 H), 6.86 (d, J=8.72 Hz, 4 H), 5.89 (m, 1 H), 3.75-4.02 (m, 2 H), 3.73 (s, 6 H), 3.53-3.63 (m, 2 H), 3.41-3.52 (m, 2 H), 3.10 (m, 1 H), 2.95-3.05 (m, 1 H), 2.73-2.89 (m, 2 H), 2.52-2.69 (m, 2 H), 2.23-2.41 (m, 2 H), 1.98-2.18 (m, 2 H), 1.73, 1.70 (2×s, 3 H), 1.14-1.49 (m, 12 H), 0.96-1.11 (m, 12 H), 0.85 (m, 3 H).

[1094] 31P-NMR (DMSO-d6, 162 MHz) δ[ppm]: 147.3, 147.1.

### 33d: 3-[[(2S,6R)-2-[[bis(4-methoxyphenyl)-phenyl-methoxy]methyl]-4-hexadecyl-6-(5-methyl-2,4-dioxo-pyrimidin-1-yl)morpholin-2-yl]methoxy-(diisopropylamino)phosphanyl]-oxy-propanenitrile

[1095] Following general procedure C, 32d (675 mg, 0.77 mmol) was converted to the title compound 33d, which was isolated as colourless foam (608 mg, 79.1%).

[1096] 1H-NMR (DMSO-d6, 400 MHz) δ[ppm]: 11.36 (br s, 1 H), 7.56, 7.53 (2×s, 1 H), 7.37-7.42 (m, 2 H), 7.19-7.31 (m, 7 H), 6.86 (d, J=8.85 Hz, 4 H), 5.89 (m, 1 H), 3.82-4.02 (m, 2 H), 3.73 (s, 6 H), 3.53-3.63 (m, 2 H), 3.39-3.52 (m, 2 H), 3.07-3.13 (m, 1 H), 2.95-3.05 (m, 1 H), 2.71-2.90 (m, 2 H), 2.62-2.68 (m, 1 H), 2.58 (m, 1 H), 2.23-2.39 (m, 2 H), 1.96-2.18 (m, 2 H), 1.73, 1.70 (2×s, 3 H), 1.13-1.45 (m, 28 H), 0.96-1.13 (m, 12 H), 0.82-0.88 (m, 3 H).

[1097] 31P-NMR (DMSO-d6, 162 MHz) δ[ppm]: 147.3, 147.1.

### 33e: 3-[[(2S,6R)-2-[[bis(4-methoxyphenyl)-phenyl-methoxy]methyl]-4-cyclohexyl-6-(5-methyl-2,4-dioxo-pyrimidin-1-yl)morpholin-2-yl]methoxy-(diisopropylamino)phosphanyl]-oxy-propanenitrile

[1098] Following general procedure C, 32e (695 mg, 0.86 mmol) was converted to the title compound 33e, which was isolated as colourless foam (560 mg, 76.2%).

[1099] 1H-NMR (DMSO-d6, 400 MHz) δ[ppm]: 11.36, 11.35 (2×br s, 1 H), 7.57, 7.54 (2×s, 1 H), 7.37-7.43 (m, 2 H), 7.21-7.31 (m, 7 H), 6.86 (d, J=8.85 Hz, 4 H), 5.86 (m, 1 H), 3.87-4.02 (m, 2 H), 3.73 (s, 6 H), 3.53-3.65 (m, 2 H), 3.40-3.52 (m, 2 H), 3.12 (m, 1 H), 3.00 (m, 1 H), 2.79-2.88 (m, 1 H), 2.64-2.77 (m, 2 H), 2.54-2.63 (m, 1 H), 2.23-2.41 (m, 3 H), 1.64-1.73 (s, 7 H), 0.91-1.25 (m, 18 H).

[1100] 31P-NMR (DMSO-d6, 162 MHz) δ[ppm]: 147.2, 146.7.

### 33f: 3-[[(2S,6R)-4-benzyl-2-[[bis(4-methoxyphenyl)-phenyl-methoxy]methyl]-6-(5-methyl-2,4-dioxo-pyrimidin-1-yl)morpholin-2-yl]methoxy-(diisopropylamino)phosphanyl]oxy-propanenitrile

[1101] Following general procedure C, 32f (589 mg, 0.78 mmol) was converted to the title compound 33f, which was isolated as colourless foam (668 mg, 99.0%).

[1102] 1H-NMR (DMSO-d6, 400 MHz) δ[ppm]: 11.34 (s, 1 H), 7.54, 7.53 (2×s, 1 H), 7.19-7.39 (m, 14 H), 6.80-6.89 (m, 4 H), 5.92 (m, 1 H), 4.10 (dd, J=9.94, 7.56 Hz, 0.5 H), 4.01 (m, 0.5 H), 3.93 (m, 0.5 H), 3.85 (m, 0.5 H), 3.73 (s, 6 H), 3.35-3.64 (m, 6 H), 3.03-3.12 (m, 2 H), 2.98 (d, J=9.10 Hz, 1 H), 2.72-2.91 (m, 2 H), 2.62-2.69 (m, 1 H), 2.12-2.26 (m, 2 H), 1.71, 1.70 (2×s, 3 H), 0.97-1.10 (m, 9 H), 0.91 (d, J=6.71 Hz, 3 H).

[1103] 31P-NMR (DMSO-d6, 162 MHz) δ[ppm]: 147.2.

### 33g: 3-[[(2S,6R)-4-acetyl-2-[[bis(4-methoxyphenyl)-phenyl-methoxy]methyl]-6-(5-methyl-2,4-dioxo-pyrimidin-1-yl)morpholin-2-yl]methoxy-(diisopropylamino)phosphanyl]oxy-propanenitrile

[1104] Following general procedure C, 32g (598 mg, 0.89 mmol) was converted to the title compound 33g, which was isolated as colourless foam (728 mg, quant.). Purification of the crude product was done by dissolving in 10 ml tert.-butyl-methylether and adding 40 ml of n-pentane. The precipitate was centrifuged and the supernatent was discarded. This washing procedure was repeated for another two times.

[1105] 1H-NMR (DMSO-d6, 400 MHz) δ[ppm]: 11.41 (br s, 1 H), 7.56-7.71 (m, 1 H), 7.35-7.46 (m, 2 H), 7.20-7.33 (m, 7 H), 6.82-6.91 (m, 4 H), 5.79-5.97 (m, 1 H), 4.27-4.45 (m, 1 H), 3.53-3.97 (m, 4 H), 3.73 (s, 6 H), 3.32-3.50 (m, 4 H), 3.02-3.19 (m, 2 H), 2.80-3.00 (m, 1 H), 2.55-2.74 (m, 2 H), 1.99-2.09 (m, 3 H), 1.69-1.81 (m, 3 H), 1.04-1.13 (m, 9 H), 0.97-1.03 (m, 3 H).

[1106] 31P-NMR (DMSO-d6, 162 MHz) δ[ppm]: 147.9, 146.9, 146.8, 146.5.

### 33h: 3-[[(2S,6R)-2-[[bis(4-methoxyphenyl)-phenyl-methoxy]methyl]-4-hexadecanoyl-6-(5-methyl-2,4-dioxo-pyrimidin-1-yl)morpholin-2-yl]methoxy-(diisopropylamino)phosphanyl]oxy-propanenitrile

[1107] Following general procedure C, 32h (872 mg, 1.03 mmol) was converted to the title compound 33h, which was isolated as colourless foam (915 mg, 87.7%).

[1108] 1H-NMR (DMSO-d6, 400 MHz) δ[ppm]: 11.42, 11.40 (2×s, 1 H), 7.55-7.71 (m, 1 H), 7.40 (m, 2 H), 7.18-7.34 (m, 7 H), 6.82-6.91 (m, 4 H), 5.73-5.99 (m, 1 H), 4.27-4.50 (m, 1 H), 3.98 (m, 0.5 H), 3.75-3.85 (m, 1.5 H), 3.73 (s, 6 H), 3.53-3.65 (m, 2 H), 3.37-3.52 (m, 2 H), 3.02-3.25 (m, 2 H), 2.82-3.00 (m, 1 H), 2.67 (m, 1 H), 2.58 (m, 1 H), 2.21-2.48 (m, 2 H), 1.69-1.80 (m, 3 H), 1.49 (br s, 2 H), 1.18-1.31 (m, 26 H), 1.04-1.12 (m, 6 H), 0.92-1.03 (m, 6 H), 0.82-0.89 (m, 3 H).

[1109] 31P-NMR (DMSO-d6, 162 MHz) δ[ppm]:147.7, 147.3, 147.2, 146.7.

[chemical structure]

### 34b: 1-[(2R,6S)-6-[[bis(4-methoxyphenyl)-phenyl-methoxy]methyl]-4-cyclohexyl-6-(triisopropylsilyloxymethyl)morpholin-2-yl]pyrimidine-2,4-dione

[1110] To a mixture of 24b (25 g, 33 mmol), cyclohexanone (16.1 g, 165 mmol) and 4 Å molecular sieves (30 g) in MeOH (450 ml) was added AcOH, to adjust the pH between 5 and 6 at 25° C. After stirring at 40° C. for 1 h, NaBH₃CN (10.3 g, 165 mmol) was added portionwise at 40° C. Stirring was continued for 12 h to achieve complete conversion. The mixture was filtered and the filtrate was concentrated i. vac. The residue was diluted with EtOAc (1500 ml), washed with H₂O (2×500 ml) and sat. NaCl-solution (500 ml). The organic layer was dried with Na₂SO₄, filtered and concentrated in vacuo. The residue was purified by column chromatography (PE/EtOAc 2:1) yielding 28 g (82%) of 34b as colourless foam.

[1111] 1H-NMR (DMSO-d6, 400 MHz) δ[ppm]: 11.42 (br s, 1 H), 7.71 (d, J=8.1 Hz, 1 H), 7.41 (br d, J=7.5 Hz, 2 H), 7.31-7.19 (m, 7 H), 6.85 (d, J=8.8 Hz, 4 H), 5.82 (br dd, J=2.6, 9.8 Hz, 1 H), 5.73 (d, J=8.1 Hz, 1 H), 4.14 (br d, J=8.9 Hz, 1 H), 3.93 (br d, J=8.8 Hz, 1 H), 3.74 (d, J=2.0 Hz, 6 H), 3.13 (br d, J=9.4 Hz, 1 H), 2.99-2.83 (m, 2 H), 2.72 (br d, J=10.8 Hz, 1 H), 2.31-2.17 (m, 3 H), 1.78-1.48 (m, 5 H), 1.32-1.09 (m, 6 H), 1.01-0.83 (m, 21 H).

### 34c: N-[9-[(2R,6S)-6-[[bis(4-methoxyphenyl)-phenyl-methoxy]methyl]-4-cyclohexyl-6-(triisopropylsilyloxymethyl)morpholin-2-yl]-6-oxo-1H-purin-2-yl]-2-methyl-propanamide

[1112] Following the protocol, described for the synthesis of 34b, 35 g (42.4 mmol) of the starting material 24c gave, after silica gel purification (PE/EtOAc 1:1), 32 g (64.7%) of the desired product 34c as colourless foam.

[1113] LCMS-Method D:

[1114] UV-wavelength [nm]=220: Rₜ[min]=1.18

[1115] Ionization method: ES⁺: [M+H]⁺=907.5

### 34e: N-[9-[(2R,6S)-6-[[bis(4-methoxyphenyl)-phenyl-methoxy]methyl]-4-cyclohexyl-6-(triisopropylsilyloxymethyl)morpholin-2-yl]purin-6-yl]benzamide

[1116] Following the protocol, described for the synthesis of 34b, 58 g (68.8 mmol) of the starting material 24e gave, after silica gel purification (PE/EtOAc 2:1), 49g (77%) of the desired product 34e as colourless foam.

[1117] 1H-NMR (DMSO-d6, 400 MHz) δ[ppm]: 11.21 (br s, 1 H), 8.77 (s, 1 H), 8.66 (s, 1 H), 8.06 (br d, J=7.2 Hz, 2 H), 7.68-7.61 (m, 1 H), 7.60-7.52 (m, 2 H), 7.38 (dd, J=1.6, 7.8 Hz, 2 H), 7.26-7.15 (m, 7 H), 6.76 (dd, J=3.1, 9.0 Hz, 4 H), 6.16 (dd, J=3.1, 9.7 Hz, 1 H), 4.29 (d, J=9.0 Hz, 1 H), 3.95 (d, J=8.8 Hz, 1 H), 3.70 (d, J=1.0 Hz, 6 H), 3.17-3.02 (m, 3 H), 2.94 (d, J=9.3 Hz, 1 H), 2.83 (br d, J=11.1 Hz, 1 H), 2.36-2.30 (m, 1 H), 1.82-1.70 (m, 4 H), 1.55 (br d,

[1118] J=11.2 Hz, 1 H), 1.34-1.15 (m, 8 H), 1.04-0.91 (m, 23 H).

### 35b: 1-[(2R,6R)-6-[[bis(4-methoxyphenyl)-phenyl-methoxy]methyl]-4-cyclohexyl-6-(hydroxymethyl)morpholin-2-yl]pyrimidine-2,4-dione

[1119] To a solution of compound 34b (28 g, 35.1 mmol) in THF (280 ml) was added NEt₃ (35 g, 351 mmol) and NEt₃.3 HF (56.3 g, 351 mmol) at room temperature. After stirring at 70° C. for 16 h under N₂-atmosphere, full deprotection could be detected by TLC. The mixture was concentrated in vacuo and the residue was diluted with EtOAc (500 ml). The organic solution was washed with water (2×200 ml) and sat. NaCl-solution (200 ml), dried with Na₂SO₄, filtered and concentrated in vacuo. The crude product was purified by column chroma-tography (PE/EtOAc 1:2), which gave 20 g (88.8%) of the title compound 35b as colourless foam.

[1120] 1H-NMR (DMSO-d6, 400 MHz) δ[ppm]: 11.41 (br s, 1 H), 7.66 (d, J=8.1 Hz, 1 H), 7.47-7.40 (m, 2 H), 7.36-7.21 (m, 7 H), 6.92 (br d, J=8.7 Hz, 4 H), 5.84 (br dd, J=2.3, 9.4 Hz, 1 H), 5.65 (br d, J=7.9 Hz, 1 H), 4.67 (br s, 1 H), 3.88 (br d, J=10.9 Hz, 1 H), 3.78 (s, 6 H), 3.72 (br d, J=10.5 Hz, 1 H), 3.15 (br d, J=9.0 Hz, 1 H), 3.10-2.96 (m, 2 H), 2.91 (br d, J=9.8 Hz, 1 H), 2.73 (br d, J=11.5 Hz, 1 H), 2.35-2.18 (m, 3 H), 1.73 (br s, 4 H), 1.32-1.10 (m, 9 H).

### 35c: N-[9-[(2R,6R)-6-[[bis(4-methoxyphenyl)-phenyl-methoxy]methyl]-4-cyclohexyl-6-(hydroxymethyl)morpholin-2-yl]-6-oxo-1H-purin-2-yl]-2-methyl-propanamide

[1121] Following the protocol, described for the synthesis of 35b, 32 g (35.3 mmol) of the starting material 34c gave, after silica gel chromatography (PE/EtOAc 1:2), 21 g (79%) of the desired product 35c as colourless foam.

[1122] 1H-NMR (DMSO-d6, 400 MHz) δ[ppm]: 12.10 (s, 1 H), 11.68 (s, 1 H), 8.04 (s, 1 H), 7.38 (d, J=7.3 Hz, 2 H), 7.31-7.20 (m, 7 H), 6.85 (d, J=8.7 Hz, 4 H), 5.91 (dd, J=3.1, 8.8 Hz, 1 H), 4.63 (t, J=5.2 Hz, 1 H), 3.87-3.78 (m, 1 H), 3.74 (s, 7 H), 3.06-2.94 (m, 3 H), 2.84-2.65 (m, 3 H), 2.43 (d, J=11.6 Hz, 1 H), 2.37-2.28 (m, 1 H), 2.37-2.28 (m, 1 H), 1.72 (br s, 4 H), 1.56 (br d, J=10.8 Hz, 1 H), 1.27-1.02 (m, 13 H).

### 35e: N-[9-[(2R,6R)-6-[[bis(4-methoxyphenyl)-phenyl-methoxy]methyl]-4-cyclohexyl-6-(hydroxymethyl)morpholin-2-yl]purin-6-yl]benzamide

[1123] Following the protocol, described for the synthesis of 35b, 49 g (53.0 mmol) of the starting material 34e gave, after a reaction time of 12 h and silica gel chromatography (PE/EtOAc 1:2), 38 g (88%) of the desired product 35e as colourless foam.

[1124] LCMS-Method D:

[1125] UV-wavelength [nm]=220: Rₜ[min]=0.94

[1126] Ionization method: ES⁺: [M+H]⁺=769.4

### 36b: 3-[[(2S,6R)-2-[[bis(4-methoxyphenyl)-phenyl-methoxy]methyl]-4-cyclohexyl-6-(2,4-dioxopyrimidin-1-yl)morpholin-2-yl]methoxy-(diisopropylamino)phosphanyl]-oxypropanenitrile

[1127] To a solution of 35b (14 g, 22.4 mmol) in DCM (150 ml) was added DIPEA (11.5 g, 89.8 mmol) and 3-[chloro-(diisopropylamino)phosphanyl]oxypropanenitrile (6.9 g, 29.2 mmol) under an Ar-atmosphere. The solution was stirred at 13° C. for 0.5 h to achieve complete conversion. The reaction mixture was concentrated in vacuo to a volume of approx. 50 ml and purified on silica (PE/EtOAc 2:1) yielding 12.0 g (65.5%) 36b as colourless foam.

[1128] LCMS-Method C:

[1129] UV-wavelength [nm]=220: Rₜ[min]=2.60

[1130] Ionization method: ES⁺: [M+H-ⁱPr₂N+OH]⁺=759.5

[1131] 1H-NMR (DMSO-d6, 400 MHz) δ[ppm]: 11.34 (br s, 1 H), 7.59-7.69 (2×d, J=8.0 Hz, 1 H), 7.35-7.44 (m, 2 H), 7.20-7.32 (m, 7 H), 6.87 (m, 4 H), 5.84 (m, 1 H), 5.59-5.68 (2×d, J=8.1 Hz, 1 H), 3.99-4.09 (m, 1 H), 3.93 (m, 1 H), 3.73 (s, 6 H), 3.54-3.68 (m, 2 H), 3.40-3.53 (m, 2 H), 3.16 (br d, J=8.9 Hz, 1 H), 2.96 (t, J=9.5 Hz, 1 H), 2.88 (m, 1 H), 2.66-2.80 (m, 2 H), 2.60 (m, 1 H), 2.15-2.35 (m, 3 H), 1.69 (m, 4 H), 1.53 (m, 1 H), 0.95-1.21 (m, 17 H).

[1132] 31P-NMR (DMSO-d6, 162 MHz) δ[ppm]: 147.4, 146.7.

### 36c: N-[9-[(2R,6S)-6-[[bis(4-methoxyphenyl)-phenyl-methoxy]methyl]-6-[[2-cyanoethoxy-(diisopropylamino)phosphanyl]oxymethyl]-4-cyclohexyl-morpholin-2-yl]-6-oxo-1H-purin-2-yl]-2-methyl-propanamide

[1133] Following the protocol, described for the synthesis of 36b, 20 g (26.6 mmol) of the starting material 35c gave, after a reaction time of 15 min at room temperature and silica gel chromatography (PE/EtOAc 1:1), 20 g (79%) of the desired product 36c as colourless foam.

[1134] LCMS-Method C:

[1135] UV-wavelength [nm]=220: Rₜ[min]=2.70, 2.73

[1136] Ionization method: ES⁺: [M+H−ⁱPr₂N+OH]⁺=868.5

[1137] 1H-NMR (DMSO-d6, 400 MHz) δ[ppm]: 12.08 (br s, 1 H), 11.63 (br s, 1 H), 8.07, 8.03 (2×s, 1 H), 7.37 (d, J=8.2 Hz, 2 H), 7.18-7.29 (m, 7 H), 6.79-6.87 (m, 4 H), 5.89 (m, 1 H), 3.92-4.11 (m, 2 H), 3.72-3.74 (m, 6 H), 3.55-3.72 (m, 2 H), 3.38-3.51 (m, 2 H), 3.10 (m, 1 H), 2.96-3.05 (m, 2 H), 2.66-2.93 (m, 4 H), 2.55-2.62 (m, 1 H), 2.27-2.45 (m, 2 H), 1.71 (m, 4 H), 1.55 (m, 1 H), 0.83-1.29 (m, 23 H).

[1138] 31P-NMR (DMSO-d6, 162 MHz) δ[ppm]: 147.5, 146.7.

### 36e: N-[9-[(2R,6S)-6-[[bis(4-methoxyphenyl)-phenyl-methoxy]methyl]-6-[[2-cyanoethoxy-(diisopropylamino)phosphanyl]oxymethyl]-4-cyclohexyl-morpholin-2-yl]purin-6-yl]benzamide

[1139] Following the protocol, described for the synthesis of 36b, 22 g (31.2 mmol) of the starting material 35e gave, after a reaction time of 15 min at room temperature and silica gel chromatography (PE/EtOAc 1:1), 22.3 g (80.5%) of the desired product 36e as colourless foam.

[1140] LCMS-Method C:

[1141] UV-wavelength [nm]=220: Rₜ[min]=2.78

[1142] Ionization method: ES⁺: [M+H−ⁱPr₂N+OH]⁺=886.6

[1143] 1H-NMR (DMSO-d6, 400 MHz) δ[ppm]: 11.18 (s, 1 H), 8.75, 8.73 (2×s, 1 H), 8.59, 8.57 (2×s, 1 H), 8.04 (d, J=7.8 Hz, 2 H), 7.64 (t, J=7.3 Hz, 1 H), 7.55 (t, J=7.6 Hz, 2 H), 7.37 (m, 2 H), 7.17-7.27 (m, 7 H), 6.77-6.84 (m, 4 H), 6.18 (m, 1 H), 3.97-4.17 (m, 2 H), 3.71 (m, 6 H), 3.56-3.71 (m, 2 H), 3.43-3.56 (m, 2 H), 2.92-3.15 (m, 4 H), 2.78-2.91 (m, 1 H), 2.70 (t, J=6.0 Hz, 1 H), 2.55-2.62 (m, 1 H), 2.31-2.47 (m, 2 H), 1.74 (m, 4 H), 1.55 (m, 1 H), 0.90-1.29 (m, 17 H).

[1144] 31P-NMR (DMSO-d6, 162 MHz) δ[ppm]: 147.0, 146.7.

[chemical structure]

### 37: 1-[(2R,6S)-6-[[bis(4-methoxyphenyl)-phenyl-methoxy]methyl]-4-cyclohexyl-6-(triisopropylsilyloxymethyl)morpholin-2-yl]-4-(1,2,4-triazol-1-yl)pyrimidin-2-one

[1145] To a mixture of 1,2,4-triazole (41.5 g, 0.601 mol) in ACN (415 ml) was added POCl₃ (30.58 g, 0.20 mol) dropwise at 20° C. At 0° C., DIPEA (126 g, 0.977 mol) was added carefully and stirring was contimued for 5 h at 0° C., followed by the addition of the starting material 34b (20 g, 25.0 mmol) in one portion. The solution was stirred for 3 h at 20° C. to achieve complete conversion. The reaction mixture was poured into EtOAc (500 ml) and water (1 l). The organic layer was separated and the aqueous phase was extracted with EtOAc (2×200 ml). The combined organic phases were washed with sat. NaHCO₃- (500 ml) and sat. NaCl-solution (500 ml), dried over anhydrous Na₂SO₄, filtered and concentrated in vacuo, yielding the title compound 37 (29 g, crude) as yellow foam, which was used without further purification.

### 34f: N-[1-[(2R,6S)-6-[[bis(4-methoxyphenyl)-phenyl-methoxy]methyl]-4-cyclohexyl-6-(triisopropylsilyloxymethyl)morpholin-2-yl]-2-oxo-pyrimidin-4-yl]benzamide

[1146] To a solution of benzamide (30.3 g, 0.251 mol) in dioxane (310 ml). was added NaH (10 g, 251 mmol) portionwise at 0° C. After stirring at 20° C. for 30 min, triazole 37 (29 g, crude product 25.0 mmol) was added and stirring was continued for 2 h to achieve complete conversion. The reaction mixture was poured into EtOAc (500 ml) and sat. NH₄Cl-solution (8 l). The aqueous layer was separated and extracted with EtOAc (2×500 ml). The combined organic phases were washed with water (2×500 ml) and sat. NaCl-solution (500 ml), dried over anhydrous Na₂SO₄ and concentrated in vacuo. The residue was purified by column chromatography (PE/EA 5:1) to give 34f (16 g, 70.8%) as yellow foam.

[1147] LCMS-Method E:

[1148] UV-wavelength [nm]=220: Rₜ[min]=1.16

[1149] Ionization method: ES⁺: [M+H]⁺=901.6

### 35f: N-[1-[(2R,6R)-6-[[bis(4-methoxyphenyl)-phenyl-methoxy]methyl]-4-cyclohexyl-6-(hydroxymethyl)morpholin-2-yl]-2-oxo-pyrimidin-4-yl]benzamide

[1150] Following the protocol, described for the synthesis of 35b, 40 g (44.4 mmol) of the starting material 34f gave, after a reaction time of 16 h and silica gel chromatography (PE/EtOAc 1:1), 24 g (72.7%) of the desired product 35f as colourless foam.

[1151] LCMS-Method E:

[1152] UV-wavelength [nm]=220: Rₜ[min]=0.92

[1153] Ionization method: ES⁺: [M+H]⁺=745.3

### 36f: N-[1-[(2R,6S)-6-[[bis(4-methoxyphenyl)-phenyl-methoxy]methyl]-6-[[2-cyanoethoxy-(diisopropylamino)phosphanyl]oxymethyl]-4-cyclohexyl-morpholin-2-yl]-2-oxo-pyrimidin-4-yl]benzamide

[1154] Following the protocol, described for the synthesis of 36b, 16 g 22.8 mmol) of the starting material 35f gave, after a reaction time of 15 min at room temperature and silica gel chromatography (PE/EtOAc 1:1), 17 g (65.5%) of the desired product 36f as colourless foam.

[1155] LCMS-Method C:

[1156] UV-wavelength [nm]=220: Rₜ[min]=2.92

[1157] Ionization method: ES⁺: [M+H−ⁱPr₂N+OH]⁺=862.5

[1158] 1H-NMR (DMSO-d6, 400 MHz) δ[ppm]: 11.29, 11.26 (2×br s, 1 H), 8.14, 8.09 (2×br d, J=7.6 Hz, 1 H), 8.01 (br d, J=7.8 Hz, 2 H), 7.63 (m, 1 H), 7.51 (t, J=7.3 Hz, 2 H), 7.35-7.45 (m, 3 H), 7.21-7.34 (m, 7 H), 6.88 (m, 4 H), 5.96 (m, 1 H), 3.94-4.15 (m, 2 H), 3.74 (s, 6 H), 3.55-3.69 (m, 2 H), 3.41-3.53 (m, 2 H), 3.19-3.28 (m, 1 H), 2.95-3.08 (m, 2 H), 2.66-2.92 (m, 2 H), 2.52-2.64 (m, 1 H), 2.32 (m, 1 H), 2.13-2.28 (m, 2 H), 1.70 (m, 4 H), 1.54 (m, 1 H), 0.91-1.27 (m, 17 H).

[1159] 31P-NMR (DMSO-d6, 162 MHz) δ[ppm]: 147.5, 146.7.

[chemical structure]

### 38a: 1-[(2R,6S)-4-cyclohexyl-6-(hydroxymethyl)-6-(triisopropylsilyloxymethyl)-morpholin-2-yl]-5-methyl-pyrimidine-2,4-dione

[1160] 5.09 g (6.26 mmol) of the DMT-ether 34a were dissolved in 120 ml DCM. After adding 8.15 g (62.6 mmol, 5.23 ml) DCAA, the reaction was stirred for 5 min at room temperature to achieve complete deprotection. 120 ml sat. NaHCO₃-solution were added and the mixture was stirred vigorously for 1 h. The organic layer was separated and dried with MgSO₄. After chromatographic purification on silica (0 to 10% MeOH in DCM) the desired product 38a was isolated as colourless foam (3.07 g, 96.0%).

[1161] LCMS-Method C:

[1162] UV-wavelength [nm]=220: Rₜ[min]=2.47

[1163] Ionization method: ES⁺: [M+H]⁺=510.3

[1164] 1H-NMR (DMSO-d6, 400 MHz) δ[ppm]: 11.29 (s, 1 H), 7.61 (s, 1 H), 5.75 (dd, J=9.9, 2.7 Hz, 1 H), 4.60 (t, J=6.0 Hz, 1 H), 3.97 (d, J=9.3 Hz, 1 H), 3.77 (d, J=9.3 Hz, 1 H), 3.38-3.53 (m, 2 H), 2.78 (m, 2 H), 2.15-2.38 (m, 3 H), 1.78 (s, 3 H), 1.65-1.76 (m, 4 H), 1.50-1.59 (m, 1 H), 1.13-1.27 (m, 5 H), 0.99-1.13 (m, 21 H).

### 38b: 1-[(2R,6S)-4-cyclohexyl-6-(hydroxymethyl)-6-(triisopropylsilyloxymethyl)morpholin-2-yl]pyrimidine-2,4-dione

[1165] 1.96 g (2.45 mmol) of the DMT-ether 34b were dissolved in 50 ml DCM. 4.15 g (2.66 ml, 31.9 mmol) DCAA were added and the solution stirred 5 min at room temperature to achieve complete conversion. After adding 100 ml sat. NaHCO₃-solution, the mixture was stirred for 1 h and the layers were separated. The aqueous layer was extracted twice with 100 ml DCM and the combined organic layers were dried with MgSO₄. After evaporation of the solvent, the crude product was purified on silica (0 to 100% EtOAc in n-heptane), which gave 1.06 g (86.9%) of the deprotected product 38b as colourless foam.

[1166] LCMS-Method C:

[1167] UV-wavelength [nm]=220: Rₜ[min]=2.51

[1168] Ionization method: ES⁺: [M+H]⁺=496.4

[1169] 1H-NMR (DMSO-d6, 400 MHz) δ[ppm]: 11.31 (s, 1 H), 7.76 (d, J=8.2 Hz, 1 H), 5.74 (dd, J=9.8, 2.7 Hz, 1 H), 5.61 (d, J=8.1 Hz, 1 H), 4.61 (t, J=5.9 Hz, 1 H), 3.97 (d, J=9.4 Hz, 1 H), 3.78 (d, J=9.3 Hz, 1 H), 3.36-3.51 (m, 2 H), 2.86 (br d, J=10.4 Hz, 1 H), 2.76 (br d, J=11.5 Hz, 1 H), 2.22-2.36 (m, 2 H), 2.15 (m, 1 H), 1.71 (br d, J=8.4 Hz, 4 H), 1.55 (m, 1 H), 0.92-1.29 (m, 26 H).

### 38c: N-[9-[(2R,6S)-4-cyclohexyl-6-(hydroxymethyl)-6-(triisopropylsilyloxymethyl)-morpholin-2-yl]-6-oxo-1H-purin-2-yl]-2-methyl-propanamide

[1170] Following the protocol described for 38b, 2.58 g (2.84 mmol) of the DMT-ether 34c were deprotected. After chromatographic purification on silicagel (0 to 70% EtOAc/MeOH (9:1) in n-heptane), 1.41 g (82.1%) of the title compound 38c were isolated as light yellow foam.

[1171] LCMS-Method C:

[1172] UV-wavelength [nm]=220: Rₜ[min]=2.92

[1173] Ionization method: ES⁺: [M+H]⁺=605.5

[1174] 1H-NMR (DMSO-d6, 400 MHz) δ[ppm]:

[1175] 12.09 (s, 1 H), 11.54 (s, 1 H), 8.21 (s, 1 H), 5.78 (dd, J=9.7, 2.7 Hz, 1 H), 4.59 (t, J=6.1 Hz, 1 H), 4.08 (d, J=8.9 Hz, 1 H), 3.73 (d, J=8.8 Hz, 1 H), 3.46 (br d, J=6.1 Hz, 2 H), 3.01 (br d, J=10.1 Hz, 1 H), 2.72-2.93 (m, 2 H), 2.37-2.56 (m, 2 H), 2.30 (m, 1 H), 1.63-1.83 (m, 4 H), 1.56 (m, 1 H), 0.94-1.31 (m, 32 H).

### 38e: N-[9-[(2R,6S)-4-cyclohexyl-6-(hydroxymethyl)-6-(triisopropylsilyloxymethyl)morpholin-2-yl]purin-6-yl]benzamide

[1176] 2.18 g (2.36 mmol) of the DMT-ether 34e were deprotected with dichloroacetic acid, following the protocol, described for the synthesis of the analog 38a. After chromatographic purification on silica (0 to 100% EtOAc in n-heptane) the desired product 38e was isolated as colourless foam (1.14 g, 77.5%).

[1177] LCMS-Method C:

[1178] UV-wavelength [nm]=220: Rₜ[min]=2.94

[1179] Ionization method: ES⁺: [M+H]⁺=623.7

[1180] 1H-NMR (DMSO-d6, 400 MHz) δ[ppm]: 11.17 (s, 1 H), 8.74 (s, 1 H), 8.70 (s, 1 H), 8.04 (br d, J=7.3 Hz, 2 H), 7.65 (m, 1 H), 7.55 (t, J=7.1 Hz, 2 H), 6.10 (m, 1 H), 4.60 (m, 1 H), 4.14 (m, 1 H), 3.88 (m, 1 H), 3.45 (br d, J=6.2 Hz, 2 H), 3.12 (m, 1 H), 2.77-2.93 (m, 2 H), 2.45 (m, 1 H), 2.35 (m, 1 H), 1.76 (m, 4 H), 1.56 (br d, J=11.5 Hz, 1 H), 1.16-1.33 (m, 4 H), 0.99-1.15 (m, 22 H).

### 38f: N-[1-[(2R,6S)-4-cyclohexyl-6-(hydroxymethyl)-6-(triisopropylsilyloxymethyl)-morpholin-2-yl]-2-oxo-pyrimidin-4-yl]benzamide

[1181] Following the protocol described for 38b, 1.94 g (2.15 mmol) of the DMT-ether 34f were deprotected. After chromatographic purification on silicagel (0 to 100% EtOAc in n-heptane), 1.18 g (91.7%) of the title compound 38f were isolated as light yellow foam.

[1182] LCMS-Method C:

[1183] UV-wavelength [nm]=220: Rₜ[min]=2.77

[1184] Ionization method: ES⁺: [M+H]⁺=599.5

[1185] 1H-NMR (DMSO-d6, 400 MHz) δ[ppm]: 11.23 (s, 1 H), 8.29 (br d, J=7.3 Hz, 1 H), 8.01 (br d, J=7.3 Hz, 2 H), 7.62 (t, J=7.5 Hz, 1 H), 7.52 (m, 2 H), 7.37 (br d, J=7.3 Hz, 1 H), 5.85 (br dd, J=9.3, 2.2 Hz, 1 H), 4.65 (t, J=6.2 Hz, 1 H), 4.03 (d, J=9.3 Hz, 1 H), 3.79 (d, J=9.3 Hz, 1 H), 3.50 (m, 2 H), 3.03 (br d, J=10.6 Hz, 1 H), 2.82 (br d, J=11.4 Hz, 1 H), 2.37 (d, J=11.5 Hz, 1 H), 2.30 (m, 1 H), 2.06 (t, J=10.2 Hz, 1 H), 1.65-1.81 (m, 4 H), 1.55 (m, 1 H), 0.91-1.33 (m, 26 H).

### 39a: [(2S,6R)-4-cyclohexyl-6-(5-methyl-2,4-dioxo-pyrimidin-1-yl)-2-(triiso-propylsilyloxymethyl)morpholin-2-yl]methyl benzoate

[1186] 3.05 g (6.0 mmol) of the starting material 38a were dissolved in 60 ml dry pyridine. At room temperature, 1.06 g (877.6 μl, 7.5 mmol) benzoyl chloride and 745.9 mg (6.0 mmol) DMAP were added and the solution was stirred for 4 h. After adding additional 212.0 mg (175.5 μl, 1.5 mmol) benzoyl chloride, the solution was stirred overnight, when complete conversion was detected. The solvent was removed in vacuo and the residue dissolved in EtOAc. The solution was washed with 5% citric acid-, sat. NaHCO₃- and sat. NaCl-solution, dried with MgSO₄ and evaporated. Purification on silica (0 to 5% MeOH in DCM) yielded 3.05 g (83.0%) of the benzoate 39a as colourless foam.

[1187] LCMS-Method C:

[1188] UV-wavelength [nm]=220: Rₜ[min]=3.57

[1189] Ionization method: ES⁺: [M+H]⁺=614.5

[1190] 1H-NMR (DMSO-d6, 400 MHz) δ[ppm]: 11.32 (s, 1 H), 7.97-8.02 (m, 2 H), 7.68 (s, 1 H), 7.52-7.58 (m, 2 H), 7.47-7.49 (m, 1 H), 5.80 (dd, J=9.9, 2.9 Hz, 1 H), 4.40 (d, J=11.3 Hz, 1 H), 4.31 (d, J=11.4 Hz, 1 H), 4.17 (d, J=9.4 Hz, 1 H), 3.95 (d, J=9.4 Hz, 1 H), 2.95 (br d, J=11.5 Hz, 1 H), 2.87 (br d, J=10.0 Hz, 1 H), 2.44 (br d, J=11.4 Hz, 1 H), 2.33 (m, 2 H), 1.69-1.80 (m, 4 H), 1.66 (s, 3 H), 1.52-1.60 (m, 1 H), 1.13-1.31 (m, 5 H), 0.96-1.12 (m, 21 H).

### 39b: [(2S,6R)-4-cyclohexyl-6-(2,4-dioxopyrimidin-1-yl)-2-(triisopropylsilyloxymethyl)-morpholin-2-yl]methyl benzoate

[1191] To a solution of 1.03 g (2.08 mmol) 38b in 30 ml DCM/pyridine (5:1) were added 398.3 mg (328.9 μl, 2.80 mmol) benzoyl chloride and 25.6 mg (208 μmol) DMAP. After stirring at room temperature for 3 h, the reaction mixture was quenched by the addition of 1 ml n-propanol. The solvents were removed in vacuo and the residue was treated with H₂O and EtOAc. The organic layer was separated and washed with 10% citric acid solution (2×), sat. NaHCO₃- and sat. NaCl-solution. After drying with MgSO₄, the crude product was purified by silicagel chromatography (0 to 100% EtOAc in n-heptane), yielding 1.14 g (92.0%) of the benzoyl ester 39b as colourless foam.

[1192] LCMS-Method C:

[1193] UV-wavelength [nm]=220: Rₜ[min]=3.56

[1194] Ionization method: ES⁺: [M+H]⁺=600.5

[1195] 1H-NMR (DMSO-d6, 400 MHz) δ[ppm]: 11.35 (s, 1 H), 7.97 (m, 2 H), 7.68 (m, 2 H), 7.54 (m, 2 H), 5.79 (dd, J=9.8, 2.8 Hz, 1 H), 5.58 (d, J=8.2 Hz, 1 H), 4.33 (s, 2 H), 4.17 (d, J=9.4 Hz, 1 H), 3.95 (d, J=9.4 Hz, 1 H), 2.93 (m, 2 H), 2.40 (br d, J=11.5 Hz, 1 H), 2.25-2.36 (m, 2 H), 1.67-1.80 (m, 4 H), 1.56 (m, 1 H), 0.92-1.31 (m, 26 H).

### 39c: [(2S,6R)-4-cyclohexyl-6-[2-(2-methylpropanoylamino)-6-oxo-1H-purin-9-yl]-2-(triisopropylsilyloxymethyl)morpholin-2-yl]methyl benzoate

[1196] Following the protocol described for the synthesis of 39b and purification on silicagel (0 to 65% EtOAc/MeOH (9:1) in n-heptane), 1.39 g (2.30 mmol) of the primary alcohol 38c gave 1.56 g (95.6%) of the title compound 39c as colourless foam.

[1197] LCMS-Method C:

[1198] UV-wavelength [nm]=220: Rₜ[min]=3.53

[1199] Ionization method: ES⁺: [M+H]⁺=709.5

[1200] 1H-NMR (DMSO-d6, 400 MHz) δ[ppm]: 11.84 (s, 1 H), 11.60 (s, 1 H), 8.09 (s, 1 H), 7.80 (m, 2 H), 7.59 (m, 1 H), 7.44 (t, J=7.8 Hz, 2 H), 5.84 (dd, J=5.8, 3.9 Hz, 1 H), 4.28 (d, J=11.6 Hz, 1 H), 4.23 (d, J=11.6 Hz, 1 H), 3.98 (d, J=9.1 Hz, 1 H), 3.85 (d, J=9.1 Hz, 1 H), 2.93-3.11 (m, 2 H), 2.74-2.90 (m, 2 H), 2.68 (d, J=11.6 Hz, 1 H), 2.45 (m, 1 H), 1.70-1.88 (m, 4 H), 1.59 (m, 1 H), 0.90-1.35 (m, 32 H).

### 39e: [(2S,6R)-6-(6-benzamidopurin-9-yl)-4-cyclohexyl-2-(triisopropylsilyloxymethyl)-morpholin-2-yl]methyl benzoate

[1201] 1.13 g (1.8 mmol) of the starting material 38e were dissolved in 20 ml dry pyridine. At room temperature, 334.9 mg (276.5 μl, 2.4 mmol) benzoyl chloride and 223.9 mg (1.8 mmol) DMAP were added and the solution was stirred for 3 h. After adding additional 103.0 mg (85.1 μl, 0.7 mmol) benzoyl chloride, the solution was stirred until complete conversion was achieved. The solvent was removed in vacuo and the residue dissolved in EtOAc. The solution was washed with H₂O, 2×10% citric acid-, sat. NaHCO₃- and sat. NaCl-solution, dried with MgSO₄ and evaporated. Purification on silica (0 to 100% EtOAc in n-heptane) yielded 877 mg (66.5%) of the benzoate 39e as colourless foam.

[1202] LCMS-Method C:

[1203] UV-wavelength [nm]=220: Rₜ[min]=3.65

[1204] Ionization method: ES⁺: [M+H]⁺=727.8

[1205] 1H-NMR (DMSO-d6, 400 MHz) δ[ppm]: 11.15 (m, 1 H), 8.71 (s, 1 H), 8.61 (s, 1 H), 8.02 (d, J=7.3 Hz, 2 H), 7.92 (d, J=7.4 Hz, 2 H), 7.59-7.69 (m, 2 H), 7.48-7.58 (m, 4 H), 6.15 (m, 1 H), 4.24-4.40 (m, 3 H), 3.99 (m, 1 H), 3.17 (m, 1 H), 2.98-3.10 (m, 2 H), 2.60 (m, 1 H), 2.42 (m, 1 H), 1.70-1.90 (m, 4 H), 1.57 (br d, J=12.1 Hz, 1 H), 1.16-1.32 (m, 4 H), 0.99-1.14 (m, 22 H).

### 39f: [(2S,6R)-6-(4-benzamido-2-oxo-pyrimidin-1-yl)-4-cyclohexyl-2-(triisopropylsilyloxymethyl)morpholin-2-yl]methyl benzoate

[1206] Following the protocol described for the synthesis of 39b and purification on silicagel (0 to 100% EtOAc in n-heptane), 1.16 g (1.94 mmol) of the primary alcohol 38f gave 1.25 g (91.9%) of the title compound 39f as pale yellow foam.

[1207] LCMS-Method C:

[1208] UV-wavelength [nm]=220: Rₜ[min]=3.74

[1209] Ionization method: ES⁺: [M+H]⁺=703.5

[1210] 1H-NMR (DMSO-d6, 400 MHz) δ[ppm]:11.25 (s, 1 H), 8.16 (br d, J=7.5 Hz, 1 H), 7.96-8.03 (m, 4 H), 7.48-7.69 (m, 6 H), 7.34 (br d, J=7.3 Hz, 1 H), 5.92 (dd, J=9.4, 2.4 Hz, 1 H), 4.39 (m, 2 H), 4.25 (d, J=9.4 Hz, 1 H), 3.97 (d, J=9.4 Hz, 1 H), 3.09 (br d, J=10.5 Hz, 1 H), 3.01 (d, J=11.6 Hz, 1 H), 2.44 (d, J=11.5 Hz, 1 H), 2.36 (m, 1 H), 2.20 (m, 1 H), 1.68-1.81 (m, 4 H), 1.56 (m, 1 H), 0.89-1.34 (m, 26 H).

### 40a: [(2R,6R)-4-cyclohexyl-2-(hydroxymethyl)-6-(5-methyl-2,4-dioxo-pyrimidin-1-yl)-morpholin-2-yl]methyl benzoate

[1211] 3.0 g (4.89 mmol) of the silylether 39a were dissolved in 15 ml DMF. After adding 7.49 g (73.3 mmol, 10.29 ml) NEt₃ and 6.03 g (36.7 mmol, 6.10 ml) NEt₃.3HF, the solution was stirred at 75° C. for 2 h, to achieve complete conversion. The reaction was cooled to room temperature and washed with 100 ml 5% NaHCO₃-solution. After filtration, the aqueous solution was extracted with DCM. The organic layer was separated, dried with MgSO₄ and evaporated. The crude product was purified by silicagel chromatography (0 to 10% MeOH in DCM), which gave 1.23 g (55.0%) of the desired deprotected product 40a, which contained about 20% of an isomeric impurity, which resulted from benzoylester migration to the free OH-group.

[1212] LCMS-Method C:

[1213] UV-wavelength [nm]=220: Rₜ[min]=1.63

[1214] Ionization method: ES⁺: [M+H]⁺=458.4

### 40b: [(2R,6R)-4-cyclohexyl-6-(2,4-dioxopyrimidin-1-yl)-2-(hydroxymethyl)morpholin-2-yl]methyl benzoate

[1215] 1.12 g (1.87 mmol) of the silylether 39b were dissolved in 18 ml THF. After adding 2.85 g (2.59 ml, 18.67 mmol) Pyr HF, the solution was stirred at room temperature for 1 h to achieve complete conversion. 120 ml sat. NaHCO₃-solution were added and the mixture was stirred vigorously for 1 h, followed by the addition of 40 ml DCM. The organic layer was separated and the aqueous phase extracted twice with DCM. The combined organic layers were dried with MgSO₄ and evaporated. The crude product was coevaporated with ACN and purified by silicagel chromatography (0 to 100% EtOAc in n-heptane), yielding 709 mg (85.6%) of the title compound 40b as colourless foam.

[1216] LCMS-Method C:

[1217] UV-wavelength [nm]=220: Rₜ[min]=1.57

[1218] Ionization method: ES⁺: [M+H]⁺=444.3

[1219] 1H-NMR (DMSO-d6, 400 MHz) □[ppm]: 11.33 (s, 1 H), 7.99 (m, 2 H), 7.68 (t, J=7.5 Hz, 1 H), 7.64 (d, J=8.1 Hz, 1 H), 7.56 (t, J=7.8 Hz, 2 H), 5.80 (dd, J=9.5, 2.9 Hz, 1 H), 5.55 (d, J=8.1 Hz, 1 H), 4.92 (t, J=5.6 Hz, 1 H), 4.29 (m, 2 H), 3.82 (dd, J=11.3 5.0 Hz, 1 H), 3.74 (dd, J=11.3, 6.2 Hz, 1 H), 2.87 (m, 2 H), 2.41 (d, J=11.5 Hz, 1 H), 2.22-2.38 (m, 2 H), 1.73 (m, 4 H), 1.55 (m, 1 H), 1.01-1.29 (m, 5 H).

### 40c: [(2R,6R)-4-cyclohexyl-2-(hydroxymethyl)-6-[2-(2-methylpropanoylamino)-6-oxo-1H-purin-9-yl]morpholin-2-yl]methyl benzoate

[1220] Following the protocol described for the synthesis of 40b, 1.54 g (2.17 mmol) of the silylether 39c were deprotected, yielding 995 mg (83.2%) of the title compound 40c after purification on silicagel (0 to 100% EtOAc/MeOH (9:1) in n-heptane) as pale yellow foam.

[1221] LCMS-Method C:

[1222] UV-wavelength [nm]=220: Rₜ[min]=1.79

[1223] Ionization method: ES⁺: [M+H]⁺=553.3

[1224] 1H-NMR (DMSO-d6, 400 MHz) δ[ppm]: 11.82 (s, 1 H), 11.68 (s, 1 H), 8.08 (s, 1 H), 7.82 (d, J=7.1 Hz, 2 H), 7.60 (t, J=7.3 Hz, 1 H), 7.45 (t, J=7.8 Hz, 2 H), 5.88 (t, J=4.7 Hz, 1 H), 4.95 (t, J=5.8 Hz, 1 H), 4.24 (d, J=11.5 Hz, 1 H), 4.17 (d, J=11.5 Hz, 1 H), 3.70 (dd, J=11.0, 5.6 Hz, 1 H), 3.57 (dd, J=10.9, 5.9 Hz, 1 H), 3.01 (m, 2 H), 2.65-2.84 (m, 3 H), 2.46 (m, 1 H), 1.71-1.87 (m, 4 H), 1.59 (m, 1 H), 1.04-1.34 (m, 11 H).

### 40e: [(2R,6R)-6-(6-benzamidopurin-9-yl)-4-cyclohexyl-2-(hydroxymethyl)morpholin-2-yl]-methyl benzoate

[1225] 870 mg (1.2 mmol) of the silylether 39e were dissolved in 15 ml NMP. After adding 1.70 g (16.8 mmol, 2.34 ml) NEt₃ and 3.18 g (19.2 mmol, 3.22 ml) NEt₃ HF, the solution was stirred at room temperature for 17 h, followed by 3 h at 65° C., when complete conversion was detected. After cooling to room temperature, 150 ml sat. NaHOC₃-solution and 50 ml EE were added and the mixture was vigorously stirred for 30 min. The organic layer was separated and washed with sat. NaHCO₃-solution and 10% NaCl-solution. After drying over MgSO₄, the solvent was evaporated in vacuo. After chromatographic purification (0 to 100% EtOAc in n-heptane), 40e was isolated as colourless foam (616 mg, 90.2%).

[1226] LCMS-Method C:

[1227] UV-wavelength [nm]=220: Rₜ[min]=1.90

[1228] Ionization method: ES⁺: [M+H]⁺=571.5

[1229] 1H-NMR (DMSO-d6, 400 MHz) δ[ppm]: 11.13 (s, 1 H), 8.70 (s, 1 H), 8.56 (s, 1 H), 8.02 (br d, J=7.3 Hz, 2 H), 7.93 (m, 2 H), 7.65 (m, 2 H), 7.48-7.59 (m, 4 H), 6.16 (dd, J=8.7, 3.0 Hz, 1 H), 4.97 (br s, 1 H), 4.21-4.38 (m, 2 H), 3.89 (br d, J=10.5 Hz, 1 H), 3.80 (br d, J=10.2 Hz, 1 H), 3.15 (m, 1 H), 3.05 (m, 1 H), 2.93 (br d, J=11.6 Hz, 1 H), 2.63 (m, 1 H), 2.37-2.44 (m, 1 H), 1.65-1.82 (m, 4 H), 1.57 (br d, J=11.7 Hz, 1 H), 1.13-1.32 (m, 4 H), 1.01-1.13 (m, 1 H).

### 40f: [(2R,6R)-6-(4-benzamido-2-oxo-pyrimidin-1-yl)-4-cyclohexyl-2-(hydroxymethyl)-morpholin-2-yl]methyl benzoate

[1230] Following the protocol described for the synthesis of 40b, 1.23 g (1.74 mmol) of the silylether 39f were deprotected, yielding 888 mg (93.2%) of the title compound 40f after purification on silicagel (0 to 100% EtOAc/MeOH (9:1) in n-heptane) as colourless foam.

[1231] LCMS-Method C:

[1232] UV-wavelength [nm]=220: Rₜ[min]=2.05

[1233] Ionization method: ES⁺: [M+H]⁺=547.3

[1234] 1H-NMR (DMSO-d6, 400 MHz) δ[ppm]: 11.25 (s, 1 H), 8.12 (br d, J=7.6 Hz, 1 H), 8.01 (m, 4 H), 7.47-7.73 (m, 6 H), 7.33 (br d, J=7.5 Hz, 1 H), 5.92 (dd, J=9.4, 2.6 Hz, 1 H), 4.95 (t, J=6.0 Hz, 1 H), 4.31-4.40 (2×d, J=11.4 Hz, 2 H), 3.92 (dd, J=11.4, 5.0 Hz, 1 H), 3.75 (dd, J=11.5, 6.6 Hz, 1 H), 3.09 (br d, J=10.3 Hz, 1 H), 2.93 (d, J=11.5 Hz, 1 H), 2.45 (d, J=11.6 Hz, 1 H), 2.36 (m, 1 H), 2.16 (m, 1 H), 1.74 (m, 4 H), 1.56 (m, 1 H), 1.00-1.32 (m, 5 H).

### 41a: [(2R,6R)-2-[[bis(4-methoxyphenyl)-phenyl-methoxy]methyl]-4-cyclo-hexyl-6-(5-methyl-2,4-dioxo-pyrimidin-1-yl)morpholin-2-yl]methyl benzoate

[1235] 2.05 g (4.48 mmol) of the starting material 40a were dissolved in 40 ml dry pyridine. AT room temperature, a solution of 1.64 g (4.70 mmol) DMT-Cl in 10 ml DCM was added dropwise and the reaction solution was stirred overnight. After adding 5 ml iPrOH, the reaction solution was evaporated and the residue dissolved in DCM. The organic solution was dried with MgSO₄ and evaporated. The obtained crude product was purified by silicagel chromatography (0 to 10% MeOH in DCM), followed by a second purification by HPLC (column: Chiralcel OZ-H/140, 250×4.6 mm, 1.0 ml/min, 30° C.; eluent: MeOH/EtOH 1:1), which gave 1.05 g (30.8%) of the title compound 41a as colourless foam.

[1236] LCMS-Method C:

[1237] UV-wavelength [nm]=220: Rₜ[min]=3.17

[1238] Ionization method: ES⁻: [M−H]⁻=758.6

[1239] 1H-NMR (DMSO-d6, 400 MHz) δ[ppm]: 11.31 (s, 1 H), 7.73-7.79 (m, 2 H), 7.63-7.71 (m, 1 H), 7.46-7.54 (m, 3 H), 7.35 (d, J=7.1 Hz, 2 H), 7.16-7.28 (m, 7 H), 6.79 (dd, J=8.9, 3.6 Hz, 4 H), 5.65 (dd, J=9.9, 2.9 Hz, 1 H), 4.50 (d, J=11.3 Hz, 1 H), 4.40 (d, J=11.1 Hz, 1 H), 3.69 (d, J=1.59 Hz, 6 H), 3.55 (d, J=8.6 Hz, 1 H), 3.01 (d, J=11.4 Hz, 1 H), 2.81 (d, J=9.9 Hz, 1 H), 2.66-2.69 (m, 1 H), 2.23-2.39 (m, 2 H), 1.61-1.78 (m, 4 H), 1.68 (s, 3 H), 1.51-1.60 (m, 1 H), 0.98-1.30 (m, 5 H).

### 41b: [(2R,6R)-2-[[bis(4-methoxyphenyl)-phenyl-methoxy]methyl]-4-cyclohexyl-6-(2,4-dioxopyrimidin-1-yl)morpholin-2-yl]methyl benzoate

[1240] To solution of 690 mg (1.56 mmol) 40b in 30 ml DCM/pyridine (4:1) were added 699 mg (2.02 mmol) DMT-Cl at room temperature. After stirring for 16 h, the solvents were removed in vacuo and the residue codestilled three times with 25 ml ACN. After adding H₂O, the mixture was extracted with EtOAc. The organic phase was separated and washed with sat. NaCl-solution. After drying with MgSO₄ and evaporation of the solvent, the crude product was purified by silicagel chromatography (0 to 100% EtOAc in n-heptane, column pre-conditioned with n-heptane+1% NEt₃), yielding 1.06 g (91.3%) of the DMT-ether 41b as colourless foam.

[1241] LCMS-Method C:

[1242] UV-wavelength [nm]=220: Rₜ[min]=3.16

[1243] Ionization method: ES⁻: [M−H]⁻=744.7

[1244] 1H-NMR (DMSO-d6, 400 MHz) δ[ppm]: 11.34 (s, 1 H), 7.64-7.76 (m, 4 H), 7.49 (m, 2 H), 7.35 (m, 2 H), 7.16-7.26 (m, 7 H), 6.74-6.81 (m, 4 H), 5.63 (dd, J=9.8, 2.8 Hz, 1 H), 5.58 (d, J=8.2 Hz, 1 H), 4.44 (s, 2 H), 3.69 (s, 3 H), 3.68 (s, 3 H), 3.57 (d, J=8.6 Hz, 1 H), 3.02 (d, J=11.6 Hz, 1 H), 2.85 (br d, J=10.2 Hz, 1 H), 2.34 (m, 1 H), 2.24 (t, J=8.6 Hz, 1 H), 1.61-1.79 (m, 4 H), 1.56 (m, 1 H), 0.98-1.31 (m, 5 H).

### 41c: [(2R,6R)-2-[[bis(4-methoxyphenyl)-phenyl-methoxy]methyl]-4-cyclohexyl-6-[2-(2-methylpropanoylamino)-6-oxo-1H-purin-9-yl]morpholin-2-yl]methyl benzoate

[1245] Following the protocol described for the synthesis of 41b, 880 mg (1.59 mmol) of the starting material 40c gave 1.30 g (95.6%) of the title compound 41c as colourless foam.

[1246] LCMS-Method C:

[1247] UV-wavelength [nm]=220: Rₜ[min]=3.16

[1248] Ionization method: ES⁻: [M−H]⁻=853.4

[1249] 1H-NMR (DMSO-d6, 400 MHz) δ[ppm]: 11.86 (br s, 1 H), 11.55 (br s, 1 H), 8.07 (s, 1 H), 7.53-7.61 (m, 3 H), 7.30-7.42 (m, 4 H), 7.16-7.27 (m, 7 H), 6.72-6.85 (m, 4 H), 5.66 (dd, J=6.6, 3.4 Hz, 1 H), 4.41 (d, J=11.5 Hz, 1 H), 4.34 (d, J=11.5 Hz, 1 H), 3.67 (s, 3 H), 3.64 (s, 3 H), 3.51 (d, J=8.1 Hz, 1 H), 3.14 (d, J=8.1 Hz, 1 H), 2.96-3.05 (m, 2 H), 2.81-2.93 (m, 2 H), 2.75 (m, 1 H), 1.79 (m, 4 H), 1.61 (br d, J=11.7 Hz, 1 H), 1.03-1.39 (m, 11 H).

### 41e: [(2R,6R)-6-(6-benzamidopurin-9-yl)-2-[[bis(4-methoxyphenyl)-phenyl-methoxy]methyl]-4-cyclohexyl-morpholin-2-yl]methyl benzoate

[1250] 610 mg (1.1 mmol) of the starting material 40e were dissolved in 30 ml dry pyridine and evaporated. This procedure was repeated three times. The compound was then dissolved in 30 ml dry pyridine, followed by the addition of 162.7 mg (223.6 μl, 1.6 mmol) NEt₃ and 554.4 mg (1.6 mmol) DMT-Cl. The reaction solution was stirred at room temperature overnight, when complete conversion was achieved. The solvent was removed in vacuo and the residue dissolved in EtOAc. After washing with H₂O, 10%-citric acid-(2×), sat. NaHCO₃- and sat. NaCl-solution, the organic phase was dried with MgSO₄. Evaporation of the solvent and purification by silicagel chromatography (0 to 100% EtOAc in n-heptane) gave 807 mg (86.5%) of the DMT-ether 41e as colourless foam.

[1251] LCMS-Method C:

[1252] UV-wavelength [nm]=220: Rₜ[min]=3.26

[1253] Ionization method: ES⁺: [M+H]⁺=873.8

[1254] 1H-NMR (DMSO-d6, 400 MHz) δ[ppm]: 11.17 (br s, 1 H), 8.69 (s, 1 H), 8.60 (s, 1 H), 8.02 (m, 2 H), 7.73 (m, 2 H), 7.64 (m, 2 H), 7.54 (m, 2 H), 7.47 (m, 2 H), 7.39 (m, 2 H), 7.18-7.28 (m, 7 H), 6.75-6.84 (m, 4 H), 5.95 (dd, J=9.4, 2.9 Hz, 1 H), 4.44 (m, 2 H), 3.65-3.72 (m, 7 H), 3.44 (m, 1 H), 3.02-3.14 (m, 2 H), 2.94 (br t, J=10.3 Hz, 1 H), 2.67 (m, 1 H), 2.41 (br d, J=7.7 Hz, 1 H), 1.66-1.83 (m, 4 H), 1.57 (br d, J=11.62 Hz, 1 H), 1.13-1.29 (m, 4 H), 1.01-1.12 (m, 1 H).

### 41f: [(2R,6R)-6-(4-benzamido-2-oxo-pyrimidin-1-yl)-2-[[bis(4-methoxyphenyl)-phenyl-methoxy]methyl]-4-cyclohexyl-morpholin-2-yl]methyl benzoate

[1255] Following the protocol described for the synthesis of 41b, 870 mg (1.59 mmol) of the starting material 40f gave 1.21 g (89.4%) of the title compound 41f as colourless foam.

[1256] LCMS-Method C:

[1257] UV-wavelength [nm]=220: Rₜ[min]=3.37

[1258] Ionization method: ES⁻: [M−H]⁻=847.4

[1259] 1H-NMR (DMSO-d6, 400 MHz) δ[ppm]: 11.27 (br s, 1 H), 8.16 (d, J=7.6 Hz, 1 H), 7.99 (m, 2 H), 7.74 (m, 2 H), 7.59-7.70 (m, 2 H), 7.44-7.55 (m, 4 H), 7.28-7.42 (m, 3 H), 7.18-7.28 (m, 7 H), 6.74-6.84 (m, 4 H), 5.74 (dd, J=9.5, 2.6 Hz, 1 H), 4.51 (m, 2 H), 3.70 (s, 3 H), 3.69 (s, 3 H), 3.65 (d, J=8.4 Hz, 1 H), 3.10 (d, J=11.4 Hz, 1 H), 3.00 (m, 1 H), 2.54 (d, J=11.9 Hz, 1 H), 2.37 (m, 1 H), 2.15 (t, J=10.5 Hz, 1 H), 1.62-1.80 (m, 4 H), 1.56 (m, 1 H), 0.98-1.32 (m, 5 H).

### 42a: 1-[(2R,6S)-6-[[bis(4-methoxyphenyl)-phenyl-methoxy]methyl]-4-cyclohexyl-6-(hydroxy-methyl)morpholin-2-yl]-5-methyl-pyrimidine-2,4-dione

[1260] 1.0 g (1.32 mmol) of the benzoylester 41a were dissolved in 12 ml EtOH/Pyr. (5:1). At 0° C. 6.58 ml (13.16 mmol) of a 2 M NaOH-solution were added. After removing the cooling bath, the reaction solution was stirred for 1 h at room temperature to achieve complete conversion. The solution was diluted with 50 ml H₂O and extracted with EtOAc. The organic layer was separated and washed with 10% citric acid-s, 5% NaHCO₃- and sat. NaCl-solution. After drying with MgSO₄ and evaporation of the solvent, the crdue product was purified on silica (0 to 50% EtOAc in n-heptane), which yielded 325 mg (37.7%) of the title compound 42a as colourless foam.

[1261] LCMS-Method C:

[1262] UV-wavelength [nm]=220: Rₜ[min]=2.33

[1263] Ionization method: ES⁺: [M+H]⁺=656.5

[1264] 1H-NMR (DMSO-d6, 400 MHz) δ[ppm]: 11.28 (s, 1 H), 7.58 (d, J=1.0 Hz, 1 H), 7.39 (d, J=7.5 Hz, 2 H), 7.19-7.32 (m, 7 H), 6.87 (d, J=8.8 Hz, 4 H), 5.56 (dd, J=9.9, 2.7 Hz, 1 H), 4.65 (t,

[1265] J=6.0 Hz, 1 H), 3.73 (s, 6 H), 3.58 (dd, J=11.4, 6.9 Hz, 1 H), 3.50 (dd, J=11.3, 5.0 Hz, 1 H), 3.35 (d, J=8.7 Hz, 1 H), 3.10 (d, J=8.6 Hz, 1 H), 2.68-2.83 (m, 2 H), 2.42 (d, J=11.6 Hz, 1 H), 2.22 (m, 1 H), 2.14 (t, J=10.4 Hz, 1 H), 1.78 (s, 3 H), 1.58-1.71 (m, 4 H), 1.53 (br d, J=12.2 Hz, 1 H), 1.00-1.32 (m, 5 H).

### 42b: 1-[(2R,6S)-6-[[bis(4-methoxyphenyl)-phenyl-methoxy]methyl]-4-cyclohexyl-6-(hydroxymethyl)morpholin-2-yl]pyrimidine-2,4-dione

[1266] 1.04 g (1.39 mmol) of the starting compound 41b were dissolved in 25 ml THF/EtOH (4:1). The solution was cooled to 0° C. and 6.97 ml (13.94 mmol) of a 2 M NaOH-solution were added. The ice bath was removed and the reaction was stirred for 1 h. After the addition of another 6.97 ml (13.94 mmol) of a 2 M NaOH-solution, stirring was continued for 3 h at room temperature and another 60 min at 45° C. to achieve complete conversion. After adding 100 ml H₂O and 1.7 g citric acid monohydrate, the mixture was extracted with EtOAc. The organic phase was separated and washed with H₂O, sat. NaHCO₃- and sat. NaCl-solution. After drying with MgSO₄, the solution was evaporated and the crude product purified by silicagel chromatography (20 to 100 EtOAc in n-heptane) to yield 823 mg (92.0%) of the desired product 42b as colourless solid.

[1267] LCMS-Method C:

[1268] UV-wavelength [nm]=220: Rₜ[min]=2.36

[1269] Ionization method: ES⁺: [M+H]⁺=642.4

[1270] 1H-NMR (DMSO-d6, 400 MHz) δ[ppm]: 11.30 (s, 1 H), 7.74 (d, J=8.1 Hz, 1 H), 7.39 (m, 2 H), 7.19-7.32 (m, 7 H), 6.87 (d, J=8.7 Hz, 4 H), 5.60 (d, J=8.1 Hz, 1 H), 5.54 (dd, J=9.7, 2.5 Hz, 1 H), 4.66 (t, J=5.9 Hz, 1 H), 3.73 (s, 6 H), 3.58 (dd, J=11.3, 6.7 Hz, 1 H), 3.48 (dd, J=11.3, 5.0 Hz, 1 H), 3.35 (d, J=8.8 Hz, 1 H), 3.10 (d, J=8.6 Hz, 1 H), 2.78 (br d, J=11.4 Hz, 2 H), 2.41 (br d, J=11.9 Hz, 1 H), 2.23 (m, 1 H), 2.08 (m, 1 H), 1.57-1.73 (m, 4 H), 1.55 (m, 1 H), 0.97-1.27 (m, 5 H).

### 42c: N-[9-[(2R,6S)-6-[[bis(4-methoxyphenyl)-phenyl-methoxy]methyl]-4-cyclohexyl-6-(hydroxymethyl)morpholin-2-yl]-6-oxo-1H-purin-2-yl]-2-methyl-propanamide

[1271] 1.28 g (1.50 mmol) of the benzoylester 41c wer dissolved in 36 ml EtOH/pyridine (2:1). 7.49 ml (14.97 mmol) of a 2 M NaOH-solution were added at 0° C. and the solution was stirred under ice cooling for 20 min. The ice bath was removed and stirring was continued for 1.5 h. The reaction solution was again cooled to 0° C., followed by the addition of 30 ml H₂O and 980 mg citric acid monohydrate. The reaction solution was extracted with 150 ml EtOAc and the organic phase was separated. After washing with 10% citric acid-solution (2×), H₂O, sat. NaHCO₃- and sat. NaCl-solution, the organic layer was dried with MgSO₄ and evaporated. The obtained crude product was purified by silicagel chromatography (0 to 100% EtOAc/MeOH (9:1) in n-heptane), yielding 721 mg (64.1%) of the title compound 42c as colourless foam.

[1272] LCMS-Method C:

[1273] UV-wavelength [nm]=220: Rₜ[min]=2.68

[1274] Ionization method: ES⁻: [M−H]⁻=749.3

[1275] 1H-NMR (DMSO-d6, 400 MHz) δ[ppm]: 12.08 (br s, 1 H), 11.52 (br s, 1 H), 8.18 (s, 1 H), 7.39 (m, 2 H), 7.20-7.33 (m, 7 H), 6.86-6.93 (m, 4 H), 5.53 (dd, J=9.7, 2.7 Hz, 1 H), 4.62 (t, J=6.2 Hz, 1 H), 3.73 (s, 3 H), 3.72 (s, 3 H), 3.45-3.63 (m, 3 H), 2.92-3.04 (m, 3 H), 2.75 (m, 1 H), 2.59 (br d, J=11.7 Hz, 1 H), 2.41 (t, J=10.6 Hz, 1 H), 2.33 (m, 1 H), 1.63-1.82 (m, 4 H), 1.57 (m, 1 H), 0.98-1.31 (m, 11 H).

### 42e: N-[9-[(2R,6S)-6-[[bis(4-methoxyphenyl)-phenyl-methoxy]methyl]-4-cyclohexyl-6-(hydroxymethyl)morpholin-2-yl]purin-6-yl]benzamide

[1276] The starting compound 41e (800 mg, 0.92 mmol) was dissolved in 32 ml EtOH/pyridine (3:1). At 0° C., 4.58 ml (9.16 mmol) of a 2 M NaOH-solution were added and the reaction mixture was stirred for 1 h at room temperature. After adjusting the pH to 7 by adding citric acid monohydrate (641 mg), 100 ml H₂O and EtOAc were added. The organic layer was separated and washed with 10% citric acid solution (2×), H₂O, sat. NaHCO₃- and NaCl-solution. After drying with MgSO₄, the organic phase was evaporated, yielding 741 mg of the crude product as colourless foam. Chomatographic purification (0 to 100% EtOAc in n-heptane) on silica gave 634 mg (90.0%) of the desired compound 42e as colourless foam.

[1277] LCMS-Method C:

[1278] UV-wavelength [nm]=220: Rₜ[min]=2.69

[1279] Ionization method: ES⁻: [M−H]⁻=767.5

[1280] 1H-NMR (DMSO-d6, 400 MHz) δ[ppm]: 11.18 (br s, 1 H), 8.69 (s, 1 H), 8.66 (s, 1 H), 8.04 (d, J=7 .7 Hz, 2 H), 7.64 (m, 1 H), 7.55 (t, J=7.6 Hz, 2 H), 7.44 (d, J=7.5 Hz, 2 H), 7.27-7.34 (m, 6 H), 7.22 (m, 1 H), 6.89 (dd, J=9.1, 2.6 Hz, 4 H), 5.84 (dd, J=9.9, 2.7 Hz, 1 H), 4.68 (br t,

[1281] J=5.8 Hz, 1 H), 3.74, 3.73 (2×s, 6 H), 3.47-3.63 (m, 3 H), 3.28 (m, 1 H), 3.03 (br d, J=9.9 Hz, 1 H), 2.86 (br d, J=11.6 Hz, 1 H), 2.72 (t, J=10.5 Hz, 1 H), 2.53 (m, 1 H), 2.24-2.34 (m, 1 H), 1.61-1.73 (m, 4 H), 1.54 (br d, J=11.4 Hz, 1 H), 1.00-1.30 (m, 5 H).

### 42f: N-[1-[(2R,6S)-6-[[bis (4-methoxyphenyl)-phenyl-methoxy]methyl]-4-cyclohexyl-6-(hydroxymethyl)morpholin-2-yl]-2-oxo-pyrimidin-4-yl]benzamide

[1282] Following the protocol described for the synthesis of 42c, 1.19 g (1.40 mmol) of the benzoate 41f were saponified, resulting in 795 mg (76.5%) of the title compound 42f after silicagel chromatography (0 to 100% EtOAc in n-heptane) as colourless solid.

[1283] LCMS-Method C:

[1284] UV-wavelength [nm]=220: Rₜ[min]=2.59

[1285] Ionization method: ES⁻: [M−H]⁻=743.3

[1286] 1H-NMR (DMSO-d6, 400 MHz) δ[ppm]: 11.25 (br s, 1 H), 8.27 (br d, J=7.5 Hz, 1 H), 8.00 (m, 2 H), 7.62 (t, J=7.5 Hz, 1 H), 7.51 (m, 2 H), 7.17-7.44 (m, 10 H), 6.85-6.92 (m, 4 H), 5.64 (dd, J=9.4, 2.6 Hz, 1 H), 4.71 (t, J=6.1 Hz, 1 H), 3.74 (m, 6 H), 3.63 (dd, J=11.6, 7.1 Hz, 1 H), 3.55 (dd, J=11.5, 5.3 Hz, 1 H), 3.41 (d, J=8.7 Hz, 1 H), 3.13 (d, J=8.6 Hz, 1 H), 2.95 (br d, J=10.1 Hz, 1 H), 2.85 (d, J=11.9 Hz, 1 H), 2.48 (m, 1 H), 2.26 (m, 1 H), 2.00 (t, J=10.3 Hz, 1 H), 1.59-1.78 (m, 4 H), 1.53 (m, 1 H), 0.98-1.30 (m, 5 H).

### 43a: 3-[[(2R,6R)-2-[[bis(4-methoxyphenyl)-phenyl-methoxy]methyl]-4-cyclo-hexyl-6-(5-methyl-2,4-dioxo-pyrimidin-1-yl)morpholin-2-yl]methoxy-(diisopropylamino)-phosphanyl]-oxypropanenitrile

[1287] 320 mg (488 μmol) of the starting material 42a were dissolved in 6 ml dry DCM. Under an Ar-atmosphere, 44 mg (244 μmol) ⁱPr₂NH-tetrazole and 190 mg (601 μmol) 2-cyanoethyl-N,N,N′,N′-tetraisopropylphosphorodiamidite were added and the solution was stirred at room temperature overnight. After adding 50 ml H₂O and DCM, the organic layer was separated, dried with MgSO₄ and evaporated. The crude product was purified by silicagel chromatography (preconditioned with n-heptane+1% NEt₃, 0 to 100% EtOAc in n-heptane), yielding 322 mg (78.6%) of the desired phosphoramidite 43a as colourless foam.

[1288] LCMS-Method B-2:

[1289] UV-wavelength [nm]=220: Rₜ[min]=0.83

[1290] Ionization method: ES⁺: [M+H−ⁱPr₂N+OH]⁺=773.3

[1291] 1H-NMR (DMSO-d6, 400 MHz) δ[ppm]: 11.32, 11.30 (2×br s, 1 H), 7.57, 7.52 (2×d, J=1.0 Hz, 1 H), 7.38 (m, 2 H), 7.19-7.32 (m, 7 H), 6.84-6.91 (m, 4 H), 5.68, 5.59 (2×m, 1 H), 3.89 (m, 0.5 H), 3.59-3.78 (m, 3.5 H), 3.73 (s, 6 H), 3.46-3.57 (m, 2 H), 3.35 (m, 1 H), 3.22 (m, 1 H), 2.66-2.84 (m, 4 H), 2.40 (m, 1 H), 2.17-2.28 (m, 2 H), 1.78, 1.76 (2×s, 3 H), 1.56-1.72 (m, 4 H), 1.47-1.56 (m, 1 H), 1.00-1.31 (m, 17 H).

[1292] 31P-NMR (DMSO-d6, 162 MHz) □[ppm]: 147.6, 147.5.

### 43b: 3-[[(2R,6R)-2-[[bis(4-methoxyphenyl)-phenyl-methoxy]methyl]-4-cyclohexyl-6-(2,4-dioxopyrimidin-1-yl)morpholin-2-yl]methoxy-(diisopropylamino)phosphanyl]oxypropane-nitrile

[1293] 797 mg (1.24 mmol) of the starting material 42b were dissolved in 27 ml dry DCM. Under an Ar-atmosphere, 644 mg (3.73 mmol) ⁱPr₂NH-tetrazole and 579 mg (610 μl, 1.86 mmol) 2-cyanoethyl-N,N,N′,N′-tetraisopropylphosphorodiamidite were added and the solution was stirred at room temperature overnight. After adding 50 ml H₂O and DCM, the organic layer was separated, dried with MgSO₄ and evaporated. The crude product (1.25 g) was dissolved in 10 ml EtOAc/diethyl ether (1:1) and 40 ml n-pentane were added. The precipitate was collected by centrifugation and the solvents were discarded. The precipitation procedure was repeated three times, which gave after drying on a Speedvac 865 mg (82.7%) of the desired product 43b as colourless solid.

[1294] LCMS-Method B-2:

[1295] UV-wavelength [nm]=220: Rₜ[min]=0.89

[1296] Ionization method: ES⁺: [DMT]⁺=303.1

[1297] 1H-NMR (DMSO-d6, 400 MHz) δ[ppm]: 11.34, 11.32 (2×br s, 1 H), 7.69, 7.65 (2×d, J=8.1 Hz, 1 H), 7.38 (m, 2 H), 7.19-7.32 (m, 7 H), 6.84-6.91 (m, 4 H), 5.56-5.66 (m, 2 H), 3.89 (m, 0.5 H), 3.44-3.79 (m, 5.5 H), 3.74 (s, 6 H), 3.35 (m, 1 H), 3.23 (m, 1 H), 2.70-2.86 (m, 3 H), 2.67 (m, 1 H), 2.38 (m, 1 H), 2.11-2.29 (m, 2 H), 1.46-1.74 (m, 5 H), 0.98-1.24 (m, 17 H).

[1298] 31P-NMR (DMSO-d6, 162 MHz) δ[ppm]: 147.5.

### 43c: N-[9-[(2R,6R)-6-[[bis(4-methoxyphenyl)-phenyl-methoxy]methyl]-6-[[2-cyanoethoxy-(diisopropylamino)phosphanyl]oxymethyl]-4-cyclohexyl-morpholin-2-yl]-6-oxo-1H-purin-2-yl]-2-methyl-propanamide

[1299] Following the protocol described for the synthesis of 43b, 695 mg (923 μmol) of the starting compound 42c gave 687 mg (78.0%) of the title compound 43c as colourless foam.

[1300] LCMS-Method B-2:

[1301] UV-wavelength [nm]=220: Rₜ[min]=0.96

[1302] Ionization method: ES⁺: [M+H−ⁱPr₂N+OH]⁺=868.3

[1303] LCMS-Method B-2:

[1304] UV-wavelength [nm]=220: Rₜ[min]=0.89

[1305] Ionization method: ES⁺: [DMT]⁺=303.1

[1306] 1H-NMR (DMSO-d6, 400 MHz) δ[ppm]: 12.06 (br s, 1 H), 11.53 (br s, 1 H), 8.05, 8.04 (2×s, 1 H), 7.34-7.42 (m, 2 H), 7.20-7.33 (m, 7 H), 6.83-6.91 (m, 4 H), 5.54-5.61 (m, 1 H), 3.87 (m, 0.5 H), 3.73, 3.72 (2×s, 6 H), 3.35-3.67 (m, 5.5 H), 3.21, 3.14 (2×d, J=8.4 Hz, 1 H), 2.65-3.03 (m, 5 H), 2.53-2.64 (m, 3 H), 2.28-2.41 (m, 1 H), 1.62-1.81 (m, 4 H), 1.57 (m, 1 H), 0.88-1.33 (m, 23 H).

[1307] 31P-NMR (DMSO-d6, 162 MHz) δ[ppm]: 147.6, 147.5.

### 43e: N-[9-[(2R,6R)-6-[[bis(4-methoxyphenyl)-phenyl-methoxy]methyl]-6-[[2-cyanoethoxy-(diisopropylamino)phosphanyl]oxymethyl]-4-cyclohexyl-morpholin-2-yl]purin-6-yl]-benzamide

[1308] 625 mg (813 μmol) of the starting material 42e were dissolved in 15 ml dry DCM. Under an Ar-atmosphere, 422 mg (2.44 mmol) ⁱPr₂NH-tetrazole and 379 mg (1.22 mmol) 2-cyanoethyl-N,N,N′,N′-tetraisopropylphosphorodiamidite were added and the solution was stirred at room temperature overnight. After adding 50 ml H₂O and DCM, the organic layer was separated and the aqueous layer extracted with DCM. The combined organic layers were dried with MgSO₄ and evaporated, which gave 835 mg of a crude product as colourless foam. The crude product was dissolved in 10 ml MTB-ether and 40 ml n-pentane were added. The precipitate was collected by centrifugation and the solvents were discarded. The precipitation procedure was repeated three times, which gave after drying on a Speedvac 710 mg (90.1%) of the desired product 43e as colourless solid.

[1309] LCMS-Method B-3:

[1310] UV-wavelength [nm]=220: Rₜ[min]=0.63

[1311] Ionization method: ES⁺: [M+H−ⁱPr₂N+OH−A^{Bzl}]⁺=647.3

[1312] 1H-NMR (DMSO-d6, 400 MHz) δ[ppm]: 11.16 (br s, 1 H), 8.72, 8.70 (2×s, 1 H), 8.60, 8.57 (2×s, 1 H), 8.04 (d, J=8.1 Hz, 2 H), 7.63 (m, 1 H), 7.55 (m, 2 H), 7.44 (m, 2 H), 7.20-7.36 (m, 7 H), 6.85-6.94 (m, 4 H), 5.83-5.95 (m, 1 H), 3.83-3.95 (m, 1 H), 3.74 (s, 6 H), 3.34-3.73 (m, 7 H), 3.00-3.11 (m, 2 H), 2.76-2.92 (m, 2 H), 2.71, 2.62 (2×m, 2 H), 2.23-2.39 (m, 1 H), 1.59-1.77 (m, 4 H), 1.47-1.58 (m, 1 H), 0.99-1.30 (m, 14 H), 0.90-0.97 (m, 3 H).

[1313] 31P-NMR (DMSO-d6, 162 MHz) δ[ppm]: 147.5, 147.3.

### 43f: N-[1-[(2R,6R)-6-[[bis(4-methoxyphenyl)-phenyl-methoxy]methyl]-6-[[2-cyanoethoxy-(diisopropylamino)phosphanyl]oxymethyl]-4-cyclohexyl-morpholin-2-yl]-2-oxo-pyrimidin-4-yl]benzamide

[1314] Following the protocol described for the synthesis of 43b, 769 mg (1.03 mmol) of the starting compound 42f gave 698 mg (71.5%) of the title compound 43f as colourless foam. In the described precipitation procedure, the crude product was dissolved in 10 ml diethyl ether instead of the EtOAc/diethyl ether (1:1) solvent mixture.

[1315] LCMS-Method B-2:

[1316] UV-wavelength [nm]=220: Rₜ[min]=0.96

[1317] Ionization method: ES⁺: [M+H−ⁱPr₂N+OH−DMT]⁺=560.2

[1318] 1H-NMR (DMSO-d6, 400 MHz) δ[ppm]: 11.27 (br s, 1 H), 8.16 (m, 1 H), 8.01 (d, J=7.4 Hz, 2 H), 7.63 (t, J=7.4 Hz, 1 H), 7.51 (m, 2 H), 7.16-7.45 (m, 10 H), 6.85-6.91 (m, 4 H), 5.73, 5.69 (2×dd, J=9.7, 2.7 Hz, 1 H), 3.89-4.01 (m, 0.5 H), 3.46-3.88 (m, 5.5 H), 3.74 (s. 6 H), 3.36-3.44 (m, 1 H), 3.24-3.34 (m, 1 H), 2.92-3.02 (m, 1 H), 2.79-2.92 (m, 1 H), 2.75 (t, J=5.9 Hz, 1 H), 2.68 (m, 1 H), 2.44 (m, 1 H), 2.27 (m, 1 H), 2.03-2.15 (m, 1 H), 1.57-1.73 (m, 4 H), 1.53 (m, 1 H), 0.98-1.29 (m, 17 H).

[1319] 31P-NMR (DMSO-d6, 162 MHz) δ[ppm]: 147.6, 147.5.

[1320] B: Synthesis of Nucleotide Analogs of Formula (I) Wherein X is O

[chemical structure]

### 44a: 3-(benzyloxymethyl)-1-[(2R,3R,4S,5S)-3,4-dihydroxy-5-(hydroxymethyl)-5-(triisopropylsilyloxymethyl)tetrahydrofuran-2-yl]-5-methyl-pyrimidine-2,4-dione

[1321] To a mixture of compound 4a (72.75 g, 0.164 mmol) in 728 ml DMF were added 44.6 g BOM-Cl (0.285 mol) and 50 g DBU (0.327 mol) at −30° C. The mixture was stirred at −15° C. to −30° C. for 3 h to achieve complete conversion. The mixture was poured into sat. NaHCO₃-solution (2 l) and extracted with EtOAc (3×1 l). The combined organic layers were dried over anhydrous Na₂SO₄, filtered and concentrated in vacuo. The residue was purified by flash chromatography (DCM/MeOH 20:1) to give 62.7 g (67.7%) of the BOM-protected product 44a as yellow oil.

[1322] 1H-NMR (CDCl₃, 400 MHz) δ[ppm]: 8.67-8.55 (m, 4 H), 7.70 (tt, J=7.64, 1.77 Hz, 2 H), 7.52-7.20 (m, 10 H), 5.69-5.62 (m, 1 H), 5.52-5.44 (m, 1 H), 4.74-4.54 (m, 2 H), 4.51-4.42 (m, 1 H), 4.11-3.63 (m, 6 H), 2.01-1.84 (m, 4 H), 1.30-0.85 (m, 21 H).

### 44b: 3-(benzyloxymethyl)-1-[(2R,3R,4S,5S)-3,4-dihydroxy-5-(hydroxymethyl)-5-(triisopropylsilyloxymethyl)tetrahydrofuran-2-yl]pyrimidine-2,4-dione

[1323] Following the protocol described for 44a, 24 g (0.056 mol) of the starting compound 4b gave 22.0 g (71.7%) of 44b after silicagel chromatography (DCM/MeOH 20:1 to 10:1) as colourless solid.

[1324] 1H-NMR (CDCl₃, 400 MHz) δ[ppm]: 8.02 (d, J=8.0 Hz, 1H), 7.34-7.31 (m, 5H), 5.95 (d, J=8.0 Hz, 1H), 5.85 (d, J=8.0 Hz, 1H), 5.35-5.32 (m, 3H), 5.08 (d, J=4.0 Hz, 1H), 4.59 (s, 2H), 4.50 (d, J=4.0 Hz, 1H), 4.24-4.19 (m, 2H), 4.09 (t, J=4.0 Hz, 1H), 3.83 (s, 2H), 3.65 (t, J=4.0 Hz, 2H), 1.03-1.02 (m, 21H).

### 45a: 3-(benzyloxymethyl)-1-[(2R,3R,4S,5S)-5-[[bis(4-methoxyphenyl)-phenyl-methoxy]-methyl]-3,4-dihydroxy-5-(triisopropylsilyloxymethyl)tetrahydrofuran-2-yl]-5-methyl-pyrimidine-2,4-dione

[1325] 7.42 g (13.1 mmol) of the starting material 44a were co-destilled twice with 40 ml pyridine and dissolved in 150 ml DCM/pyridine (4:1). After adding 4.77 g (13.8 mmol) of DMT-Cl, the solution was stirred at room temperature for 65 h. The solution was washed twice with aqueous citric acid-solution (10%), followed by H₂O, sat. NaHCO₃- and NaCl-solution. The organic phase was separated, dried with MgSO₄ and purified by silicagel chromatography (0 to 100% EtOAc in n-heptane), to give 8.50 g (74.7%) of the desired product 45a as colourless foam.

[1326] LCMS-Method A:

[1327] UV-wavelength [nm]=220: Rₜ[min]=2.34

[1328] Ionization method: ES⁺: [M+Na]⁺=889.5

[1329] 1H-NMR (CDCl₃, 400 MHz) δ[ppm]: 7.46-7.40 (m, 1 H), 7.35-7.12 (m, 14 H), 6.75 (d, J=7.91 Hz, 4 H), 6.04 (d, J=5.52 Hz, 1 H), 5.53-5.37 (m, 2 H), 4.67-4.54 (m, 2 H), 4.46-4.37 (m, 2 H), 3.89 (d, J=10.29 Hz, 1 H), 3.76-3.68 (m, 7 H), 3.62 (d, J=10.16 Hz, 1 H), 3.52 (br d, J=8.41 Hz, 1 H), 3.40-3.33 (m, 1 H), 3.17 (d, J=10.16 Hz, 1 H), 1.44 (s, 3 H), 1.05-0.85 (m, 21 H).

### 45b: 3-(benzyloxymethyl)-1-[(2R,3R,4S,5S)-5-[[bis(4-methoxyphenyl)-phenyl-methoxy]-methyl]-3,4-dihydroxy-5-(triisopropylsilyloxymethyl)tetrahydrofuran-2-yl]pyrimidine-2,4-dione

[1330] To a solution of compound 44b (21.0 g, 38 mmol) in 230 ml dry DMF was added DIPEA (9.8 g, 76 mmol) and DMT-Cl (15.4 g, 45.6 mmol) at room temperature. The reaction solution was stirred under N₂-atmosphere for 4 h. After adding 30 ml EtOH, the solvent was removed under reduced pressure and the residue was purified by column chromatography on silica gel (PE/EtOAc 10:1 to 1:1), which gave 19.0 g (58.5%) of 45b as yellow foam.

[1331] 1H-NMR (DMSO-d6, 400 MHz) δ[ppm]: 7.72 (d, J=8.0 Hz, 1H), 6.90 (d, J=8.0 Hz, 4H), 7.39-7.24 (m, 14H), 5.89 (d, J=8.0 Hz, 1H), 3.51 (d, J=8.0 Hz, 1H), 5.37-5.24 (m, 4H), 4.58 (s, 2H), 4.34 (t, J=4.0 Hz, 1H), 4.24 (dd, J=12.0, 8.0 Hz, 1H), 3.73 (s, 6H), 3.40 (d, J=12.0 Hz, 1H), 3.29 (d, J=12.0 Hz, 1H), 1.19-0.86 (m, 21H).

### 46a: 3-(benzyloxymethyl)-1-[(2R,6S)-6-[[bis(4-methoxyphenyl)-phenyl-methoxy]methyl]-3,5-dihydroxy-6-(triisopropylsilyloxymethyl)-1,4-dioxan-2-yl]-5-methyl-pyrimidine-2,4-dione

[1332] To a solution of 45a (20 g, 23.07 mmol) in 400 ml acetone/water (3:1) was added a solution of NaIO₄ (6.9 g, 32.29 mmol) in 100 ml water at room temperature. After stirring for 16 h, the solvent was removed in vacuo and the residue was dissolved in EtOAc (300 ml) and washed with sat. NaHCO₃ (200 ml) and brine (200 ml). The organic layer was dried over anhydrous Na₂SO₄, filtered and concentrated in vacuo to give 46a as yellow foam, which was used for the next step without further purification.

[1333] LCMS-Method A:

[1334] UV-wavelength [nm]=220: Rₜ[min]=2.30, 2.32 (two isomers)

[1335] Ionization method: ES⁺: [M+Na]⁺=905.5

### 46b: 3-(benzyloxymethyl)-1-[(2R,6S)-6-[[bis(4-methoxyphenyl)-phenyl-methoxy]methyl]-3,5-dihydroxy-6-(triisopropylsilyloxymethyl)-1,4-dioxan-2-yl]pyrimidine-2,4-dione

[1336] 20 g (23.5 mmol) of 45b were converted to the title compound 46b, following the protocol, described for 46a (18.6 g, crude).

[1337] LCMS-Method A:

[1338] UV-wavelength [nm]=220: Rₜ[min]=2.23, 2.25 (two isomers)

[1339] Ionization method: ES⁺: [M+Na]⁺=891.4

### 47a: 3-(benzyloxymethyl)-1-[(1R)-1-[(1S)-1-[[bis(4-methoxyphenyl)-phenyl-methoxy]methyl]-1-(hydroxymethyl)-2-triisopropylsilyloxy-ethoxy]-2-hydroxy-ethyl]-5-methyl-pyrimidine-2,4-dione

[1340] To a solution of compound 46a (crude product, 23.07 mmol) in 320 ml EtOH was added NaBH₄ (1.05 g, 27.68 mmol) portionwise at room temperature. The mixture was stirred overnight and the solvent was removed in vacuo. The residue was dissolved in EtOAc (500 ml) and washed with sat. NaHCO₃-solution (500 ml) and brine (500 ml). The organic layer was dried over anhydrous Na₂SO₄, filtered and concentrated in vacuo. After column chromatography (DCM/MeOH 20:1) 12.0 g of 47a (48%) were isolated as yellow foam.

[1341] LCMS-Method A:

[1342] UV-wavelength [nm]=220: Rₜ[min]=2.31

[1343] Ionization method: ES⁺: [M+Na]⁺=891.5

[1344] 1H-NMR (CDCl₃, 400 MHz) □[ppm]: 7.52-7.06 (m, 20 H), 6.80-6.65 (m, 5 H), 6.08 (dd, J=7.03, 3.76 Hz, 1 H), 5.44-5.25 (m, 1 H), 4.64-4.46 (m, 2 H), 3.85-3.63 (m, 12 H), 3.60-3.40 (m, 2 H), 3.35.3.22 (m, 2 H), 2.95-2.66 (m, 2 H), 1.80 (s, 3 H), 1.51 (s, 3 H), 1.03-0.81 (m, 23 H).

### 47b: 3-(benzyloxymethyl)-1-[(1R)-1-[(1S)-1-[[bis(4-methoxyphenyl)-phenyl-methoxy]-methyl]-1-(hydroxymethyl)-2-triisopropylsilyloxy-ethoxy]-2-hydroxy-ethyl]pyrimidine-2,4-dione

[1345] To a solution of 15.35 g (17.7 mmol, crude) 46b in 250 ml EtOH, were added 818 mg (21.2 mmol) NaBH₄ at room temperature. The reaction was stirred for 16 h, when complete conversion was detected. The solvent was removed in vacuo and the residue was dissolved in EtOAc. After the organic solution was washed with H₂O, sat. NaHCO₃- and sat. NaCl-solution, the organic layer was dried with MgSO₄ and evaporated, which gave 14.85 g (98.3%) of 47b as coloulress foam, which was used without further purification.

[1346] LCMS-Method A:

[1347] UV-wavelength [nm]=220: Rₜ[min]=2.23

[1348] Ionization method: ES⁺: [M]⁺=303.2 (DMT⁺)

### 47c: N-[9-[(1R)-1-[(1S)-1-[[bis(4-methoxyphenyl)-phenyl-methoxy]methyl]-1-(hydroxy-methyl)-2-triisopropylsilyloxy-ethoxy]-2-hydroxy-ethyl]-6-oxo-1H-purin-2-yl]-2-methyl-propanamide

[1349] To a solution of 23c (30 g, 35 mmol) in 400 ml anhydrous EtOH was added NaBH₄ (1.6 g, 42 mmol) at 15-20° C. After stirring for 4 h, the pH was adjusted to 7 by using 10% citric acid solution (about 25 ml). The solvent was concentrated in vacuo and the residue was purified by column chromatography on silica gel (DCM/MeOH 20:1 to 10:1), which gave 22.0 g (74.5%) of 47c as a yellow solid.

[1350] 1H-NMR (DMSO-d6, 400 MHz) δ[ppm]: 12.06 (s,1H), 11.71 (s,1H), 8.04 (s, 1H), 7.37-7.28 (m, 3H), 7.26-7.19 (m, 11H), 6.87-6.83 (m, 4H), 6.09 (d, J₁=5.6 Hz, J₂=5.6 Hz, 1H), 5.22 (d, J=5.6 Hz, 1H), 4.75 (d, J₁=4.8 Hz, J₂=4.8 Hz, 1H), 3.85-3.84 (m, 2H), 3.74-3.70 (m, 9H), 3.68-3.49 (m, 2H), 3.14 (m, 1H), 2.99-2.81 (m, 1H), 1.15-1.12 (m, 6H), 0.80-0.79 (m, 21H).

### 47e: N-[9-[(1R)-1-[(1S)-1-[[bis(4-methoxyphenyl)-phenyl-methoxy]methyl]-1-(hydroxy-methyl)-2-triisopropylsilyloxy-ethoxy]-2-hydroxy-ethyl]purin-6-yl]benzamide

[1351] 3.55 g (4.1 mmol) of the starting material 23e were dissloved in 60 ml ethanol. Under an Ar-atmosphere, 285.5 mg (7.4 mmol) sodium boron hydride were added and the mixture was stirred for 2 h at room temperature. After cooling the reaction mixture to 0° C., 50 ml citric acid were added, followed by the addition of sat. NaHCO₃-solution to achieve a pH of 7. The solvent was removed in vacuo and the aqueous residue was diluted with H₂O and extracted with EtOAc. The organic layer was separated and washed with sat. NaHCO₃- and sat. NaCl-solution. After drying with MgSO₄, the solvent was removed and the crude product purified on silica (0 to 5% MeOH in DCM), which gave 2.15 g of the desired diol 47e as light yellow foam.

[1352] LCMS-Method C:

[1353] UV-wavelength [nm]=220: Rₜ[min]=3.21

[1354] Ionization method: ES⁺: [M+H]⁺=862.7

[1355] 1H-NMR (DMSO-d6, 400 MHz) δ[ppm]: 11.14 (s, 1 H), 8.66 (s, 1 H), 8.47 (s, 1 H), 8.05 (br d, J=7.3 Hz, 2 H), 7.61-7.67 (m, 1 H), 7.51-7.60 (m, 2 H), 7.36 (d, J=7.3 Hz, 2 H), 7.27 (br t, J=7.6 Hz, 2 H), 7.17-7.23 (m, 5 H), 6.83 (dd, J=9.0, 3.0 Hz, 4 H), 6.43 (t, J=5.7 Hz, 1 H), 5.17 (t, J=5.7 Hz, 1 H), 4.63 (t, J=4.7 Hz, 1 H), 3.76-3.99 (m, 2 H), 3.55-3.76 (m, 10 H), 3.17-3.26 (m, 1 H), 3.05 (d, J=9.7 Hz, 1 H), 0.78-1.02 (m, 21).

### 48a: [(2R)-2-[3-(benzyloxymethyl)-5-methyl-2,4-dioxo-pyrimidin-1-yl]-2-[(1S)-1-[[bis(4-methoxyphenyl)-phenyl-methoxy]methyl]-1-(hydroxymethyl)-2-triisopropylsilyloxy-ethoxy]ethyl]4-methylbenzenesulfonate

[1356] To a solution of 47a (10.8 g, 12.43 mmol), NEt₃ (3.14 g, 31.07 mmol) and DMAP (1.52 g, 12.43 mmol) in 108 ml DCM was added a solution of Ts-Cl (1.9 g, 9.94 mmol) in 54 ml DCM at 15° C. The mixture was stirred at 2 h, followed by the additon of another 500 mg Ts-Cl, dissolved in 5 ml DCM. After stirring for another 1 h at 15° C., the reaction mixture was washed with sat. NaHCO₃-solution (200 ml) and brine (200 ml), dried over anhydrous Na₂SO₄, filtered and concentrated in vacuo. The residue was purified by column chroma-tography (PE/EtOAc 2:1) to give 48a (10 g, 78.7%) as yellow oil.

[1357] 1H-NMR (CDCl₃, 400 MHz) δ[ppm]: 7.74-7.43 (m, 2 H), 7.34-7.00 (m, 18 H) 6.84-6.64 (m, 4 H), 6.42-6.24 (m, 1 H), 5.43-5.15 (m, 2 H), 5.00-4.72 (m, 1 H), 4.63-4.47 (m, 2 H), 4.21-3.90 (m, 2 H), 3.83-3.56 (m, 10 H), 3.29-3.11 (m, 1 H), 2.44-2.19 (m, 4 H), 1.89-1.64 (m, 3 H), 1.07-0.71 (m, 21 H).

### 48b: [(2R)-2-[3-(benzyloxymethyl)-2,4-dioxo-pyrimidin-1-yl]-2-[(1S)-1-[[bis(4-methoxy-phenyl)-phenyl-methoxy]methyl]-1-(hydroxymethyl)-2-triisopropylsilyloxy-ethoxy]ethyl]4-methylbenzenesulfonate

[1358] 3.0 g (3.5 mmol) 47b were converted to 48b, following the protocol for 48a by using 1.2 eq. Ts-Cl. After final purification on silicagel (PE/EtOAc 10:1 to 2:1), 2.0 g (57%) of the title compound 48b were isolated as colourless foam.

[1359] 1H-NMR (DMSO-d6, 400 MHz) δ[ppm]: 7.65-7.56 (m, 3H), 7.35-7.18 (m, 16H), 6.84-6.80 (m, 4H), 6.37-6.36 (m, 1H), 5.74 (s, 2H), 5.64 (d, J=12.0 Hz, 1H), 5.23-5.18 (m, 2H), 4.93-4.91 (m, 1H), 4.52 (s, 2H), 4.18-4.09 (m, 2H), 3.71 (s, 6H), 3.23-3.01 (m, 4H), 2.34 (s, 3H), 0.96-0.79 (m, 21H).

### 48c: [(2R)-2-[(1S)-1-[[bis(4-methoxyphenyl)-phenyl-methoxy]methyl]-1-(hydroxymethyl)-2-triisopropylsilyloxy-ethoxy]-2-[2-(2-methylpropanoylamino)-6-oxo-1H-purin-9-yl]ethyl]4-methylbenzenesulfonate

[1360] To a solution of 47c (31.5 g, 40.8 mmol) in 537 ml anhydrous DCM were added NEt₃ (10.3 g, 102 mmol) and DMAP (4.98 g, 40.8 mmol) at 0° C. under N₂-atmosphere. After 10 min, Ts-Cl (9.3 g, 49 mmol) was added to the mixture at 0° C. and stirring was continued at 15-20° C. for 6 h. The solvent was evaporated and the residue was purified by column chromatography (DCM/MeOH 20:1 to 10:1) to give 48c (30 g, 73.7%) as a yellow solid.

[1361] 1H-NMR (DMSO-d6, 400 MHz) δ[ppm]: 12.03 (s,1H), 11.59 (s,1 H), 8.11 (s, 2 H), 7.09 (s, 1 H), 7.50-7.49 (m, 2 H), 7.31-7.16 (m, 12 H), 6.87-6.86 (m, 4 H), 6.59-6.58 (m, 2 H), 6.31 (s, 1 H), 4.96 (s, 1 H), 4.62 (s, 1 H), 4.37 (s, 1 H), 4.04 (s, 2 H), 3.66-3.61 (m, 4 H), 3.59-3.51 (m, 1 H), 3.12-3.03 (m, 2 H), 2.95 (s, 6 H), 2.79-2.61 (m, 1 H), 2.33 (s, 3 H), 1.20-1.11 (m, 7 H),0.86-0.79 (m, 21 H).

### 48e: [(2R)-2-(6-benzamidopurin-9-yl)-2-[(1S)-1-[[bis(4-methoxyphenyl)-phenyl-methoxy]-methyl]-1-(hydroxymethyl)-2-triisopropylsilyloxy-ethoxy]ethyl]4-methyl-benzenesulfonate

[1362] 2.15 g (2.5 mmol) of the diol 47e were dissolved in 60 ml DCM. At room temperature, 891.4 mg (1.22 ml, 8.7 mmol) NEt₃, 503.8 mg (2.6 mmol) Ts-Cl and 30.8 mg (0.25 mmol) DMAP were added and the solution was stirred for 0.5 h. After adding additional 167.9 mg (0.9 mmol) p-toluene sulfonylchloride after 2 and 4 h, the solution was stirred for another 15 h to achieve complete conversion. After the addition of 150 ml H₂O, the organic layer was separated and dried with MgSO₄. The solvent was removed and the obtained crude product (2.56 g) 48e used without further purification.

[1363] LCMS-Method C:

[1364] UV-wavelength [nm]=220: Rₜ[min]=3.46

[1365] Ionization method: ES⁻: [M−H]⁻=1014.8

[1366] 1H-NMR (DMSO-d6, 400 MHz) □[ppm]: 11.20 (br s, 1 H), 8.53 (s, 1 H), 8.43 (s, 1 H), 8.04-8.10 (m, 2 H), 7.62-7.70 (m, 1 H), 7.54-7.60 (m, 2 H), 7.43-7.48 (m, 2 H), 7.12-7.35 (m, 11 H), 6.77-6.86 (m, 4 H), 6.58 (m, 1 H), 4.80 (m, 1 H), 4.59 (m, 1 H), 4.35 (m, 1 H), 3.73 (s, 3 H), 3.72 (s, 3 H), 3.50-3.67 (m, 4 H), 3.21 (m, 1 H), 3.09 (m, 1 H), 2.35 (s, 3 H), 0.82 (br s, 21 H).

### 49a: 3-(benzyloxymethyl)-1-[(2R,6S)-6-[[bis(4-methoxyphenyl)-phenyl-methoxy]methyl]-6-(triisopropylsilyloxymethyl)-1,4-dioxan-2-yl]-5-methyl-pyrimidine-2,4-dione

[1367] To a mixture of compound 48a (10.5 g, 10.26 mmol) in 343 ml anhydrous THF and 343 ml MeOH was added a solution of 2 M NaOH (74 mL, 147.47 mmol) at 15° C. The mixture was stirred at 65° C. for 3 h, when full conversion was detected. The mixture was neutralized with aqueous citric acid (10%) and concentrated in vacuo. The residue was dissolved in EtOAc (700 ml) and washed with sat. NaHCO₃-solution (700 ml). The organic layer was dried over anhydrous Na₂SO₄, filtered and concentrated in vacuo. The residue was purified by column chromatography (PE/EtOAc 5:1) to give the title compound 49a (4.9 g, 49.1%) as yellow oil.

[1368] MS (m/z)=873.4 (M+Na)

[1369] 1H-NMR (CDCl₃, 400 MHz) δ[ppm]: 7.62-7.18 (m, 19 H), 6.82 (br d, J=8.66 Hz, 4 H), 6.10 (dd, J=10.04, 3.39 Hz, 1 H), 5.53 (s, 1 H), 4.74 (s, 1 H), 4.26-4.15 (m, 1 H), 4.04-3.88 (m, 2 H), 3.81 (d, J=1.00 Hz, 7 H), 3.72-3.59 (m, 1 H), 3.31-3.12 (m, 3 H), 1.94-1.80 (m, 3 H), 1.17-0.78 (m, 23 H).

### 49b: 3-(benzyloxymethyl)-1-[(2R,6S)-6-[[bis(4-methoxyphenyl)-phenyl-methoxy]methyl]-6-(triisopropylsilyloxymethyl)-1,4-dioxan-2-yl]pyrimidine-2,4-dione

[1370] To a solution of compound 48b (1.0 g, 1.0 mmol) in 250 ml MeOH was added NaOMe (2.5 g, 45.0 mmol). The mixture was heated at 50° C. under N₂-atmosphere for 3 h, when TLC showed complete conversion. The solvent was removed under reduced pressure and the residue purified by column chromatography on silica gel (PE/EtOAc 10:1 to 3:1) to give 49b (0.27 g, 33%) as a white foam.

[1371] 1H-NMR (CDCl₃, 400 MHz) δ[ppm]: 7.54 (d, J=8.0 Hz, 1 H), 7.39-7.37 (m, 2 H), 7.35-7.30 (m, 6 H), 7.28-7.26 (m, 3 H), 7.24-7.22 (m, 1 H), 6.85 (d, J=8.0 Hz, 4 H), 6.05 (dd, J=12.0, 4.0 Hz, 1 H), 5.79 (d, J=12.0 Hz, 1 H), 5.49 (s, 2 H), 4.72 (s, 2 H), 4.20 (d, J=8.0 Hz, 1H), 4.0 (dd, J=12.0, 4.0 Hz, 1 H), 3.94 (d, J=12.0 Hz, 1 H), 3.86 (d, J=12.0 Hz, 1 H), 3.79 (s, 6 H), 3.56 (d, J=12.0 Hz, 1 H), 3.22-3.12 (m, 3 H), 1.10-0.95 (m, 21 H).

### 49c: 2-amino-9-[(2R,6S)-6-[[bis(4-methoxyphenyl)-phenyl-methoxy]methyl]-6-(triisopropylsilyloxymethyl)-1,4-dioxan-2-yl]-1H-purin-6-one

[1372] To a solution of compound 48c (28 g, 28 mmol) in 616 ml MeOH was added dropwise 151 ml (758 mmol) of a 5 M NaOH at 15 to 20° C. The mixture was stirred between 60 and 70° C. for 30 min to achieve complete conversion. The mixture was cooled to 0° C. and the pH was adjusted to 7, using 10% citric acid solution (about 200 ml). The solvents were concentrated at 30° C. and the remaining aqueous phase was extracted with DCM (3×500 ml). The combined organic layers were washed with brine (500 ml), dried over anhydrous Na₂SO₄ and concentrated. The crude product was purified by column chromatography (DCM/MeOH 20:1 to10:1) to give the 49c (18 g, 79%) as a yellow solid.

[1373] 1H-NMR (DMSO-d6, 400 MHz) δ[ppm]: 10.71 (m,1 H), 7.91 (m,1 H), 7.41-7.40 (m, 2 H), 7.27-7.20 (m, 12 H), 6.82-6.50 (m, 6 H), 6.50 (s, 1 H), 5.88-5.85 (m, 1 H), 4.17-4.14 (m, 1 H), 3.96-3.89 (m, 1 H), 3.80 (m, 2 H), 3.74-3.72 (m, 10 H), 3.69-3.61 (m, 1 H), 3.10-3.08 (m, 1 H), 2.41-2.58 (m, 1 H), 0.94-0.91 (m, 21 H).

### 49e: 9-[(2R,6S)-6-[[bis(4-methoxyphenyl)-phenyl-methoxy]methyl]-6-(triisopropylsilyl-oxymethyl)-1,4-dioxan-2-yl]purin-6-amine

[1374] To a solution of 2.45 g (2.4 mmol) of the tosylate 48e in 50 ml dioxane were added 36.16 ml (72.3 mmol) 2 M NaOH. After stirring for 2 h at 80° C., the reaction mixture was cooled to room temperature and the organic solvent was evaporated. To the aqueous residue, 250 ml H₂O and 150 ml DCM were added, followed by 4.5 ml acetic acid. The organic layer was separated and washed with sat. NaHCO₃-solution. After drying with MgSO₄, the solvent was removed and the crude product purified on silica (0 to 50% MeOH/EtOAc (1:1) in DCM), which gave 1.22 g of the dioxane 49e (68.6%) as light yellow foam.

[1375] LCMS-Method C:

[1376] UV-wavelength [nm]=220: Rₜ[min]=3.41

[1377] Ionization method: ES⁺: [M+H]⁺=740.6

[1378] 1H-NMR (DMSO-d6, 400 MHz) δ[ppm]: 8.33 (s, 1 H), 8.16 (s, 1 H), 7.11-7.45 (m, 11 H), 6.72-6.79 (m, 4 H), 6.13 (m, 1 H), 4.13-4.26 (m, 2 H), 4.04 (m, 1 H), 3.93 (m, 1 H), 3.5 (m, 1 H), 3.71 (s, 3 H), 3.70 (s, 3 H), 3.66 (br d, J=11.6 Hz, 1 H), 3.06 (d, J=9.5 Hz, 1 H), 2.92 (d, J=9.5 Hz, 1 H), 0.88-0.95 (m, 21 H).

### 50a: 1-[(2R,6R)-6-(hydroxymethyl)-6-(triisopropylsilyloxymethyl)-1,4-dioxan-2-yl]-5-methyl-pyrimidine-2,4-dione

[1379] To a solution of compound 49a (3.7 g, 4.35 mmol) in 55.5 ml EtOAc was added Pd(OH)₂/C (2 g, 20% on carbon and 50% in water) and trichloroacetic acid (1.42 g, 8.70 mmol). The reaction mixture was stirred at 15° C. under H₂ (15 psi) for 1 h to achieve complete conversion. The mixture was filtered and the filtrate was concentrated in vacuo to give the crude debenzylated and detritylated intermediate as yellow oil, which was dissolved in 90 ml MeOH. After adding NEt₃ (1.14 g, 11.28 mmol) at 15° C., the solution was stirred overnight, when complete conversion was detected. The solvent was removed in vacuo and the residue was purified by column chromatography (DCM/MeOH 50:1), which gave 950 mg of the title compound 50a (51.0%) as white foam.

[1380] MS (m/z)=451.2 (M+Na)

[1381] 1H-NMR (DMSO-d6, 400 MHz) δ[ppm]: 8.22 (s, 1 H), 7.26-7.17 (m, 1 H), 6.06-5.93 (m, 1 H), 5.52 (d, J=8.16 Hz, 1 H), 4.39-4.25 (m, 1 H), 4.08 (d, J=11.92 Hz, 1 H), 4.01-3.90 (m, 1 H), 3.85 (d, J=9.29 Hz, 1 H), 3.74 (s, 2 H), 3.56-3.49 (m, 1 H), 3.31 (dd, J=11.29, 10.29 Hz, 1 H), 2.32-2.10 (m, 1 H), 2.02-1.89 (m, 3 H), 1.32-0.96 (m, 17 H).

### 50b: 1-[(2R,6R)-6-(hydroxymethyl)-6-(triisopropylsilyloxymethyl)-1,4-dioxan-2-yl]pyrimidine-2,4-dione

[1382] Starting with 9.5 g (11.4 mmol) of 49b, the title compound 50b was synthesized following the protocol described for 50a. After purification on silica gel (PE/EtOAc 10:1 to 1:1), 4.0 g (86%) of 50b were isolated as white foam.

[1383] MS (m/z)=415.0 (M+H)

[1384] 1H-NMR (DMSO-d6, 400 MHz) δ[ppm]: 8.74 (br. s., 1 H), 7.47 (d, J=8.03 Hz, 1 H), 6.02-5.97 (m, 1 H), 5.85-5.78 (m, 1 H), 5.50 (br. s., 1 H), 4.32-4.26 (m, 1 H), 4.08 (d, J=12.05 Hz, 1 H), 4.03-3.96 (m, 1 H), 3.85 (d, J=9.29 Hz, 1 H), 3.73 (s, 2 H), 3.51 (d, J=12.05 Hz, 1 H), 3.27 (t, J=10.67 Hz, 1 H), 1.19-1.09 (m, 21 H).

### 51a: 1-[(2R,6S)-6-[[bis(4-methoxyphenyl)-phenyl-methoxy]methyl]-6-(triisopropylsilyloxymethyl)-1,4-dioxan-2-yl]-5-methyl-pyrimidine-2,4-dione

[1385] The starting compound 50a (683 mg, 1.5 mmol) was dissolved in 30 ml dry DCM. At room temperature, 753 mg (1.03 ml, 7.4 mmol) NEt₃ and 616 mg (1.8 mmol) DMT-Cl were added and the reaction was stirred for 16 h, when the conversion of starting material was completed. The reaction solution was evaporated and the crude product was purified by silicagel chromatography (0 to 100% EtOAc in n-heptane), which delivered 990 mg (91.0%) of the DMT-protected product 51a as light yellow foam.

[1386] LCMS-Method A:

[1387] UV-wavelength [nm]=220: Rₜ[min]=2.31

[1388] Ionization method: ES⁺: [M+Na]⁺=753.4

### 52a: 1-[(2R,6S)-6-[[bis(4-methoxyphenyl)-phenyl-methoxy]methyl]-6-(hydroxymethyl)-1,4-dioxan-2-yl]-5-methyl-pyrimidine-2,4-dione

[1389] 985 mg (1.35 mmol) of the starting material 51a were dissolved 40 ml THF. After adding 5.95 g (8.18 ml, 58.25 mmol) NEt₃ and 10.80 g (10.92 ml, 65.0 mmol) NEt₃.3 HF, the reaction was stirred at 65° C. until complete conversion was detected (approx. 16 h). The solvent was removed and the residue was poured into 400 ml H₂O/sat- NaHCO₃-solution (1:2). The aqueous mixture was extracted twice with DCM (2×50 ml). The organic layers were dried with MgSO₄ and evaporated to yield 956 mg of a crude product, which was purified on silica (preconditioned with 1% NEt₃ in n-heptane, 10 to 100% EtOAc in n-heptane). 760 mg (98.2%) of the desired alcohol 52a were isolated as colourless foam.

[1390] LCMS-Method A:

[1391] UV-wavelength [nm]=220: Rₜ[min]=1.86

[1392] Ionization method: ES⁺: [M]⁺=303.1 (DMT⁺)

[1393] 1H-NMR (DMSO-d6, 400 MHz) δ[ppm]: 11.41 (s, 1 H), 7.56-7.61 (m, 1 H), 7.40 (d, J=7.34 Hz, 2 H), 7.20-7.32 (m, 7 H), 6.87 (d, J=8.56 Hz, 4 H), 5.90 (dd, J=10.09, 3.36 Hz, 1 H), 4.79 (t, J=5.20 Hz, 1 H), 3.70-3.85 (m, 10 H), 3.62 (d, J=11.74 Hz, 1 H), 3.49 (t, J=10.76 Hz, 1 H), 2.97-3.12 (m, 2 H), 1.70 (s, 3 H).

### 53a: 3-[[(2S,6R)-2-[[bis(4-methoxyphenyl)-phenyl-methoxy]methyl]-6-(5-methyl-2,4-dioxo-pyrimidin-1-yl)-1,4-dioxan-2-yl]methoxy-(diisopropylamino)phosphanyl]oxypropanenitrile

[1394] 669 mg (1.2 mmol) of the starting material 52a and 415 mg (530 μl, 3.1 mmol) DIPEA were dissolved in 10 ml DCM. Under and Ar-atmosphere, 384 mg (361 μl, 1.6 mmol) 2-cyanoethyl-N,N-diisopropylchlorophosphoramidite were added at 0° C. and the solution was stirred for 1 h, allowing to reach room temperature. To achieve complete conversion, additional 0.5 eq. DIPEA and 2-cyanoethyl-N,N-diisopropylchlorophosphoramidite were added and the reaction was stirred for another 2 h. After adding 200 μl n-butanol, the reaction was stirred for 10 minutes. The solution was washed with 50 ml of H₂O. The aqueous layer was separated and extracted with 50 ml DCM. The organic layers were dried with MgSO₄ and evaporated. The residue was dissolved in 30 ml diethylether and added dropwise in 100 ml n-pentane at −30° C. The precipitate was filtered and dried in vacuo, to yield 723 mg (80.1%) of the desired product 53a as colourless solid.

[1395] 1H-NMR (DMSO-d6, 400 MHz) δ[ppm]: 11.40 (s, 1 H), 7.63, 7.60 (2×s, 1 H), 7.36-7.45 (m, 2 H), 7.21-7.34 (m, 7 H), 6.84-6.90 (m, 4 H), 5.93-6.03 (m, 1 H), 3.76-4.04 (m, 4 H), 3.74 (s, 6 H), 3.42-3.71 (m, 6 H), 2.98-3.12 (m, 2 H), 2.58-2.74 (m, 2 H), 1.75, 1.72 (2×s, 3 H), 0.95-1.14 (m, 12 H).

[1396] 31P-NMR (DMSO-d6, 162 MHz) δ[ppm]: 148.8, 148.7.

### 51c: N-[9-[(2R,6S)-6-[[bis(4-methoxyphenyl)-phenyl-methoxy]methyl]-6-(triisopropylsilyloxymethyl)-1,4-dioxan-2-yl]-6-oxo-1H-purin-2-yl]-2-methyl-propanamide

[1397] To a solution of 49c (14.18 g, 18.8 mmol) in 150 ml anhydrous pyridine was added TMSCl (15.22 g, 141 mmol) at 0° C. under N₂-atmosphere. After stirring for 2 h at room temperature, 2-methylpropanoyl chloride (2.18 g, 20.6 mmol) was added at 0° C. and stirring was continued for 2 h at room temperature, to achieve complete conversion. After adding 20 ml EtOH, the mixture was stirred for additional 10 min. The solution was poured into ice-water (500 ml) and extracted with DCM (3×500 ml). The combined organic layers were washed with 10% aqueous citric acid (2×500 ml), sat. NaHCO₃-solution (300 ml) and brine (200 ml), dried over anhydrous Na₂SO₄ and concentrated. The crude product was purified by preparative HPLC (0.1% FA/ACN), which gave 9.5 g (61.2%) of 51c as a white solid.

[1398] 1H-NMR (DMSO-d6, 400 MHz) δ[ppm]: 8.08 (s, 2 H), 7.39-7.26 (m, 2 H), 7.25-7.19 (m, 8 H), 6.80 (d, J=8.0 Hz, 4 H), 5.79 (d, J=1.6 Hz, 1 H), 4.18-4.12 (m, 1 H), 3.99-3.81 (m, 4 H), 3.72 (s, 7 H), 3.69 (d, J=10 Hz, 1 H), 3.11 (d, J=11.2 Hz, 1 H), 2.93 (d, J=10.4 Hz, 1 H), 2.72 (s, 1 H), 1.11-1.08 (m, 7 H), 1.01-0.91 (m, 21 H).

### 51e: N-[9-[(2R,6S)-6-[[bis(4-methoxyphenyl)-phenyl-methoxy]methyl]-6-(triisopropylsilyloxymethyl)-1,4-dioxan-2-yl]purin-6-yl]benzamide

[1399] 1.84 g (2.5 mmol) of the dioxane 49e were dissolved in 30 ml dry pyridine under an Ar-atmosphere. At room temperature, 1.05 g (867 μl, 7.5 mmol) benzoyl chloride were added and the reaction was stirred for 3 h. The solvent was removed in vacuo and the residue was dissolved in H₂O and extracted with EtOAc. The organic layer was separated and washed with citric acid solution (10%) (2×100 ml), H₂O (1×100 ml) and sat. NaHCO₃-solution (1×100 ml). After drying with MgSO₄, the solvent was removed and the crude product (2.61 g, yellow foam) dissolved in 40 ml pyridine/EtOH (1:1). At 0° C., 7.46 ml (14.9 mmol) 2 N NaOH were added and the reaction mixture was stirred for 30 min. After adding 864 μl AcOH, the reaction solution was concentrated i.vac. The residue was treated with 100 ml H₂O and extracted with 100 ml EtOAc. The organic layer was separated and washed with citric acid solution (10%) (2×100 ml), H₂O (1×100 ml), sat. NaHCO₃-solution (1×100 ml) and sat. NaCl-solution (1×100 ml), dried with MgSO₄ and evaporated. Purification of the crude product (2.19 g) on silica (0 to 70% EtOAc in n-heptane) gave 1.72 g (82.0%) of the title compound 51e as colourless foam.

[1400] LCMS-Method C:

[1401] UV-wavelength [nm]=220: Rₜ[min]=3.56

[1402] Ionization method: ES⁻: [M−H]⁻=842.8

[1403] 1H-NMR (DMSO-d6, 400 MHz) δ[ppm]: 11.26 (br s, 1 H), 8.77 (s, 1 H), 8.68 (s, 1 H), 8.05 (m, 2 H), 7.64 (br t, J=7.3 Hz, 1 H), 7.56 (m, 2 H), 7.37 (dd, J=7.8, 1.5 Hz, 2 H), 7.13-7.28 (m, 7 H), 6.76 (dd, J=8.9, 1.7 Hz, 4 H), 6.28 (dd, J=10.1, 3.4 Hz, 1 H), 4.20-4.36 (m, 2 H), 4.12 (m, 1 H), 3.84-3.99 (m, 2 H), 3.64-3.75 (m, 7 H), 3.06 (m, 1 H), 2.96 (m, 1 H), 0.88-1.06 (m, 21 H).

### 52c: N-[9-[(2R,6S)-6-[[bis(4-methoxyphenyl)-phenyl-methoxy]methyl]-6-(hydroxymethyl)-1,4-dioxan-2-yl]-6-oxo-1H-purin-2-yl]-2-methyl-propanamide

[1404] 1.33 g (1.61 mmol) of 51c were dissolved in 16 ml DMF. After adding 1.65 g (2.26 ml, 16.1 mmol) NEt₃ and 1.32 g (1.34 ml, 8.05 mmol) NEt₃.3HF, the solution was stirred for 2 h at 90° C. The reaction mixture was cooled to room temperature, followed by the addition of 2.5 g NaHCO₃ and 10 ml H₂O. After stirring for 2 h, the mixture was evaporated and the residue was dissolved in 25 ml DCM/iPrOH (4:1) and purified on silica (0 to 10% MeOH in DCM) to yield 0.83 g (76.5%) of the title compound 52c.

[1405] LCMS-Method C:

[1406] UV-wavelength [nm]=220: Rₜ[min]=2.33

[1407] Ionization method: ES⁺: [M+H]⁺=670.2

[1408] 1H-NMR (DMSO-d6, 400 MHz) δ[ppm]: 12.11 (br s, 1 H), 11.66 (s, 1 H), 8.11 (s, 1 H), 7.37 (d, J=7.46 Hz, 2 H), 7.18-7.29 (m, 7 H), 6.84 (dd, J=8.93, 2.69 Hz, 4 H), 5.98 (dd, J=8.31, 4.40 Hz, 1 H), 4.81 (t, J=5.26 Hz, 1 H), 3.90-4.02 (m, 2 H), 3.67-3.86 (m, 4 H), 3.72 (s, 6 H), 3.04 (d, J=9.54 Hz, 1 H), 2.96 (m, 1 H), 2.75-2.81 (m, 1 H), 1.11 (t, J=6.66 Hz, 6 H).

### 52e: N-[9-[(2R,6S)-6-[[bis(4-methoxyphenyl)-phenyl-methoxy]methyl]-6-(hydroxymethyl)-1,4-dioxan-2-yl]purin-6-yl]benzamide

[1409] 1.10 g (1.3 mmol) of the silylether 51e were dissolved in 20 ml NMP. After adding 3.47 g (3.50 ml, 20.9 mmol) NEt₃ HF and 1.85 g (2.54 ml, 18.2 mmol) NEt₃, the reaction solution was stirred at 65° C. for 18 h. After cooling to room temperature, 250 ml sat. NaHCO₃-solution and 150 ml EtOAc were added and the mixture was stirred for 30 min. The organic layer was separated and washed with sat. NaHCO₃- and twice with sat. NaCl-solution. After drying with MgSO₄, the solvent was removed and the crude product purified by silicagel chromatography (preconditioned with 0.5% NEt₃, 0 to 100% EtOAc in n-heptane), yielding 852 mg (95.1%) of 52e as colourless foam.

[1410] LCMS-Method C:

[1411] UV-wavelength [nm]=220: Rₜ[min]=2.43

[1412] Ionization method: ES⁺: [M+H]⁺=688.3

[1413] 1H-NMR (DMSO-d6, 400 MHz) δ[ppm]: 11.22 (br s, 1 H), 8.75 (s, 1 H), 8.59 (s, 1 H), 8.04 (d, J=7.6 Hz, 2 H), 7.64 (t, J=7.1 Hz, 1 H), 7.55 (t, J=7.6 Hz, 2 H), 7.38 (d, J=7.6 Hz, 2 H), 7.14-7.32 (m, 7 H), 6.80 (m, 4 H), 6.26 (dd, J=9.8, 3.3 Hz, 1 H), 4.85 (t, J=5.4 Hz, 1 H), 4.29 (t, J=10.6 Hz, 1 H), 4.09 (dd, J=11.1, 3.2 Hz, 1 H), 3.73-3.90 (m, 4 H), 3.72 (s, 3 H), 3.71 (s, 3 H), 3.03 (m, 1 H), 2.95 (m, 1 H).

### 53c: N-[9-[(2R,6S)-6-[[bis(4-methoxyphenyl)-phenyl-methoxy]methyl]-6-[[2-cyanoethoxy-(diisopropylamino)phosphanyl]oxymethyl]-1,4-dioxan-2-yl]-6-oxo-1H-purin-2-yl]-2-methyl-propanamide

[1414] 100 mg (149 μmol) of the alcohol 52c, 0.2 g molecular sieves (4 Å) and 13.5 mg (75 μmol) diisopropylammonium tetrazolide were dissolved in 2.5 ml dry DCM. Under an Ar-atmosphere, 45.5 mg (48 μl, 146 μmol) 2-cyanoethyl-N,N,N′,N′-tetraisopropylphosphoro-diamidite were added and the solution was stirred for 2 h at room temperature to achieve complete conversion. After adding sat. NaHCO₃-solution, the organic phase was separated and the aqueous phase washed 1× with DCM. The combined organic layers were washed with sat. NaCl-solution, dried with MgSO₄ and evaporated. The crude product was purified on silica (preconditioned with DCM+0.5% NEt₃, 0 to 10% MeOH in DCM), yielding 95 mg (73.1%) of the title compound 53c as colourless foam.

[1415] LCMS-Method C:

[1416] UV-wavelength [nm]=220: Rₜ[min]=2.34, 2.36

[1417] Ionization method: ES⁺: [M]⁺=787.2 (M−ⁱPr₂N+OH+H⁺)

[1418] 1H-NMR (DMSO-d6, 400 MHz) δ[ppm]: 12.09 (br s, 1 H), 11.61, 11.58 (2×s, 1 H), 8.13, 8.08 (2×s, 1 H), 7.35 (m, 2 H), 7.18-7.28 (m, 7 H), 6.80-6.85 (m, 4 H), 5.97 (m, 1 H), 3.95-4.07 (m, 4 H), 3.56-3.94 (m, 4 H), 3.72 (s, 6 H), 3.36-3.54 (m, 2 H), 2.96-3.11 (m, 2 H), 2.68-2.82 (m, 2 H), 2.59 (m, 1 H), 0.96-1.15 (m, 12 H), 0.83-0.90 (m, 6 H).

[1419] 31P-NMR (DMSO-d6, 162 MHz) δ[ppm]:148.1, 147.9.

### 53e: N-[9-[(2R,6S)-6-[[bis(4-methoxyphenyl)-phenyl-methoxy]methyl]-6-[[2-cyanoethoxy-(diisopropylamino)phosphanyl]oxymethyl]-1,4-dioxan-2-yl]purin-6-yl]benzamide

[1420] 848 mg (1.2 mmol) of the starting material 52e and 640 mg (3.7 mmol) diisopropylammon-ium tetrazolide were dissolved in 25 ml dry DCM. Under an Ar-atmosphere, 574.7 mg (1.9 mmol) 2-cyanoethyl-N,N,N′,N′-tertaisopropylphosphorodiamidite were added at room temperature. After 16 h, 50 ml H₂O were added. The organic layer was separated and the aqueous phase extracted with DCM. The combined organic layers were dried with MgSO₄ and the solvent was removed at 35° C. in vacuo. The crude product was dissolved in 10 ml EtOAc/diethylether (1:1) and 40 ml n-pentane were added. The precipitate was collected by centrifugation and the solvents were discarded. The precipitation procedure was repeated three times, which gave after drying on a Speedvac 991 mg (90.5%) of the desired product 53e as colourless solid.

[1421] LCMS-Method B-3:

[1422] UV-wavelength [nm]=220: Rₜ[min]=0.61

[1423] Ionization method: ES⁺: [M+H−ⁱPr₂N+OH]⁺=805.3

[1424] 1H-NMR (DMSO-d6, 400 MHz) δ[ppm] 11.21 (br s, 1 H), 8.76, 8.74 (2×s, 1 H), 8.63, 8.61 (2×s, 1 H), 8.04 (d, J=7.3 Hz, 2 H), 7.65 (t, J=7.3 Hz, 1 H), 7.55 (m, 2 H), 7.37 (br d, J=8.3 Hz, 2 H), 7.14-7.30 (m, 7 H), 6.75-6.86 (m, 4 H), 6.30 (m, 1 H), 4.27 (m, 1 H), 3.85-4.17 (m, 4 H), 3.61-3.80 (m, 9 H), 3.49 (m, 2 H), 3.08 (m, 1 H), 2.98 (dd, J=9.1, 7.1 Hz, 1 H), 2.72 (m, 1 H), 2.62 (m, 1 H), 1.04-1.14 (m, 6 H), 1.02 (m, 3 H), 0.93 (d, J=6.8 Hz, 3 H).

[1425] 31P-NMR (DMSO-d6, 162 MHz) δ[ppm]: 147.7, 147.6.

[chemical structure]

### 54: [(2R)-2-[3-(benzyloxymethyl)-2,4-dioxo-pyrimidin-1-yl]-2-[(1S)-1-[[bis(4-methoxy-phenyl)-phenyl-methoxy]methyl]-1-(p-tolylsulfonyloxymethyl)-2-triisopropylsilyloxy-ethoxy]ethyl]4-methylbenzenesulfonate

[1426] 14.80 g (17.31 mmol) of the starting material 47b were dissolved in 120 ml dry pyridine. At room tmperature, 13.33 g (69.23 mmol) Ts-Cl were added and the reaction was stirred at room temperature. After 23 h, 1.0 g (8.2 mmol) DMAP were added and stirring was continued for another 24 h. Additional 6.67 g (34.62 mmol) Ts-Cl were added and the reaction mixture was stirred for 48 h to achieve complete conversion. The solvent was removed and the residue was dissolved in EtOAc. The organic solution was washed with H₂O, aqueous citric acid (10%), sat. NaHCO₃-solution and brine. Drying over MgSO₄ and evaporation of the solvent, gave the crude product, which was purified on silica (preconditioned with n-heptane+0.5% NEt₃, 20 to 50% EtOAc in n-heptane), yielding 12.0 g (59.6%) of 54 as colourless foam.

[1427] LCMS-Method A:

[1428] UV-wavelength [nm]=220: Rₜ[min]=2.33

[1429] Ionization method: ES⁺: [M+Na]⁺=1185.5

### 55: [(2R)-2-[3-(benzyloxymethyl)-2,4-dioxo-pyrimidin-1-yl]-2-[(1S)-1-(hydroxymethyl)-1-(p-tolylsulfonyloxymethyl)-2-triisopropylsilyloxy-ethoxy]ethyl]4-methylbenzenesulfonate

[1430] A solution of 12.0 g (10.31 mmol) of 54 in 240 ml DCM was treated with 26.87 g (17.22 ml, 206.28 mmol) DCA. The solution was stirred at room temperature for 30 min to achieve complete conversion. The organic solution was washed with sat. NaHCO₃-solution and the layers were separated. The aqueous phase was washed 2× with DCM and the combined organic layers were dried with MgSO₄. After evaporation of the solvent, the crude product was purified on silica (0 to 100 EtOAc in n-heptane), yielding 7.84 g (88.3%) of the title compound 55 as orange oil.

[1431] LCMS-Method A:

[1432] UV-wavelength [nm]=220: Rₜ[min]=2.19

[1433] Ionization method: ES⁺: [M+H]⁺=861.3

### 56: [(2S,6R)-6-[3-(benzyloxymethyl)-2,4-dioxo-pyrimidin-1-yl]-2-(triisopropylsilyloxy-methyl)-1,4-dioxan-2-yl]methyl 4-methylbenzenesulfonate

[1434] 7.83 g (9.09 mmol) 55 were dissolved in 250 ml dry MeOH. After adding 22.11 g (409.18 mmol) sodium methoxide, the solution was stirred at 50° C. After 2.5 h, the solvent was removed and the residue dissolved in EtOAc. The organic solution was washed with H₂O, and brine, dried with MgSO₄ and evaporated. The crude product was purified on silica (20 to 100% ethyl in n-heptane), yielding the desired dioxane 56 as a colourless foam (3.84 g, 61.3%).

[1435] LCMS-Method A:

[1436] UV-wavelength [nm]=220: Rₜ[min]=2.20

[1437] Ionization method: ES⁺: [M+H]⁺=689.3

### 57: [(2R,6R)-6-[3-(benzyloxymethyl)-2,4-dioxo-pyrimidin-1-yl]-2-(triisopropylsilyloxy-methyl)-1,4-dioxan-2-yl]methyl benzoate

[1438] 3.84 g (5.57 mmol) of starting compound 56 were dissolved in 200 ml DMF. After adding 2.03 g (13.94 mmol) sodium benzoate, the solution was stirred at 150° C. for 24 h, to achieve complete conversion. The reaction mixture was cooled to room temperature and the solvent was removed i.vac. The residue was dissolved in EtOAc and washed 2× with H₂O and brine. After drying over MgSO₄ and evaporation of the solvent, the crude product was purified on silica (0 to 100% EtOAc in n-heptane), yielding 2.63 g (73.8%) of 57 as colourless foam.

[1439] LCMS-Method A:

[1440] UV-wavelength [nm]=220: Rₜ[min]=2.24

[1441] Ionization method: ES⁺: [M+H]⁺=639.3

### 58: [(2R,6R)-6-(2,4-dioxopyrimidin-1-yl)-2-(triisopropylsilyloxymethyl)-1,4-dioxan-2-yl]methyl benzoate

[1442] To a solution of 2.62 g (4.10 mmol) 57 in 65 ml MeOH were added 144 mg (0.21 mmol) Pd(OH)₂ (20% on carbon) under an Ar-atmosphere. After the solution has been purged with H₂, the reaction mixture was stirred at room temperature under an atmosphere of H₂ at 4 bar. After 1 h, the catalyst was filtered and the filtrate was evaporated under reduced pressure. The crude product (2.11 g) was dissolved in 40 ml of MeOH and 3.63 g (5.0 ml, 35.87 mmol) NEt₃ were added. The solution was stirred for 30 min at room temperature, to achieve complete conversion. After adjusting the pH to 7, using aqueous citric acid (10%), the solvent was removed and the residue was dissolved in EtOAc. After washing with aqueous citric acid (10%) and sat. NaHCO₃-solution, the organic phase was dried with MgSO₄ and evaporated, yielding 1.97 g (99.3%, crude) of 58 as colourless foam.

[1443] LCMS-Method A:

[1444] UV-wavelength [nm]=220: Rₜ[min]=2.12

[1445] Ionization method: ES⁺: [M+H]⁺=519.3

### 59: [(2R,6R)-6-(2,4-dioxopyrimidin-1-yl)-2-(hydroxymethyl)-1,4-dioxan-2-yl]methyl benzoate

[1446] 980 mg (1.89 mmol) of 58 were dissolved in 35 ml dry THF. At room temperature, 7.20 g (6.55 ml, 47.24 mmol) pyridine-HF (65%) were added and the solution was stirred for 1.5 h. After adding another 7.20 g pyridine-HF (65%), stirring was continued for 5 h, when full conversion was detected. After adding solid NaHCO₃ (approx. 24 g), the reaction was stirred for 1.5 h. The inorganic salts were filtered off and the filtrate was evaporated. The crude product was purified on silica (0 to 5% MeOH in DCM), yielding the title compound 59 (494 mg, 72.2%) as colourless foam.

[1447] LCMS-Method A:

[1448] UV-wavelength [nm]=220: Rₜ[min]=1.22

[1449] Ionization method: ES⁺: [M+H]⁺=363.1

### 60: [(2S,6R)-2-[[bis(4-methoxyphenyl)-phenyl-methoxy]methyl]-6-(2,4-dioxopyrimidin-1-yl)-1,4-dioxan-2-yl]methyl benzoate

[1450] To a solution of 490 mg (1.35 mmol) 59 in 20 ml DCM were added 874 mg (1.18 ml, 6.76 mmol) DIPEA and 584 mg (1.69 mmol) DMT-Cl at room temperature. After stirring for 16 h, the solution was evaporated and the crude product was purified on silica (preconditioned with n-heptane+0.5% NEt₃, 0 to 100% EtOAc in n-heptane), yielding 894 mg (99.5%) of the desired DMT-ether 60 as colourless foam.

[1451] LCMS-Method A:

[1452] UV-wavelength [nm]=220: Rₜ[min]=1.96

[1453] Ionization method: ES⁺: [M+Na]⁺=687.2

### 52b: 1-[(2R,6S)-6-[[bis(4-methoxyphenyl)-phenyl-methoxy]methyl]-6-(hydroxymethyl)-1,4-dioxan-2-yl]pyrimidine-2,4-dione

[1454] 888 mg (1.34 mmol) 60 were dissolved in 20 ml THF and 5 ml MeOH. At 0° C., 6.68 ml (13.36 mmol) of a 2 M NaOH solution were added and the solution was stirred for 1 h, allowing to reach room temperature. After cooling down to 0° C., 12 ml of an aqueous citric acid solution (10%) were added and the mixture was extracted with EtOAc. The organic layer was separated and washed with sat. NaHCO₃-solution. After drying with MgSO₄, the solvent was removed. The crude product was purified on silica (preconditioned with n-heptane+0.5% NEt₃, 0 to 100% (EtOAc+5% MeOH) in n-heptane), which gave 730 mg (97.5%) of 52b as colourless foam.

[1455] LCMS-Method A:

[1456] UV-wavelength [nm]=220: Rₜ[min]=1.78

[1457] Ionization method: ES⁻: [M−H]⁻=559.4

[1458] 1H-NMR (DMSO-d6, 400 MHz) δ[ppm]: 11.42 (br s, 1 H), 7.67 (d, J=8.07 Hz, 1 H), 7.39 (d, J=6.95 Hz, 2 H), 7.19-7.33 (m, 7 H), 6.85-6.90 (m, 4 H), 5.89 (dd, J=10.03, 3.18 Hz, 1 H), 5.66 (d, J=8.07 Hz, 1 H), 4.80 (t, J=5.26 Hz, 1 H), 3.70-3.83 (m, 10 H), 3.55 (d, J=11.62 Hz, 1 H), 3.44 (m, 1 H), 3.08 (d, J=9.41 Hz, 1 H), 2.97 (d, J=9.41 Hz, 1 H).

### 53b: 3-[[(2S,6R)-2-[[bis(4-methoxyphenyl)-phenyl-methoxy]methyl]-6-(2,4-dioxopyrimidin-1-yl)-1,4-dioxan-2-yl]methoxy-(diisopropylamino)phosphanyl]oxypropanenitrile

[1459] 725 mg (1.29 mmol) starting compound 52b and 122 mg (0.71 mmol) diisopropylammonium tetrazolide were dissolved in 20 ml dry DCM. Under an Ar-atmosphere, 429 mg (452 μl, 1.43 mmol) 2-cyanoethyl N,N,N′,N′-tetraisopropylphosphoro-diamidite were added at room temperature and the solution was stirred for 16 h. After adding another 122 mg (0.71 mmol) diisopropylammonium tetrazolide and 429 mg (452 μl, 1.43 mmol) 2-cyanoethyl N,N,N′,N′-tetraisopropylphosphorodiamidite, stirring was continued for 2 h, to achieve complete conversion. The solvent was removed and the residue was dissolved in EtOAc and washed with H₂O and sat. NaHCO₃-solution. After drying with MgSO₄, the solvent was evaporated and the crude product was dissolved in 25 ml diethyl ether. Under stirring, the organic solution was dropped into 150 ml n-pentane. The precipitate was filtered and dried at 40° C. i. vac., yielding 751 mg (76.3%) of the title compound 53b as colourless solid.

[1460] 1H-NMR (DMSO-d6, 400 MHz) δ[ppm]: 11.39 (br s, 1 H), 7.65-7.73 (m, 1 H), 7.34-7.43 (m, 2 H), 7.19-7.34 (m, 7 H), 6.84-6.90 (m, 4 H), 5.95 (m, 1 H), 5.66 (m, 1 H), 3.92-4.10 (m, 2 H), 3.78-3.91 (m, 2 H), 3.73 (s, 6 H), 3.41-3.68 (m, 6 H), 3.11 (m, 1 H), 2.98 (m, 1 H), 2.70 (m, 1 H), 2.61 (m, 1 H), 0.94-1.14 (m, 12 H).

[1461] 31P-NMR (DMSO-d6, 162 MHz) δ[ppm]: 148.9, 148.7.

[chemical structure]

### 61: [(2S,6R)-6-(2,4-dioxopyrimidin-1-yl)-2-(triisopropylsilyloxymethyl)-1,4-dioxan-2-yl]-methyl benzoate

[1462] 2.66 g (6.42 mmol) of 50b were dissolved in 35 ml dry pyridine. At room temperature, 1.37 g (1.13 ml, 9.62 mmol) benzoyl chloride were added dropwise and the solution was stirred for 16 h, to achieve complete conversion. The solvent was removed in vacuo and the residue was dissolved in EtOAc. After washing with 10% aqueous citric acid solution (2×), sat. NaHCO₃- and NaCl-solution, the organic layer was dried with MgSO₄ and evaporated. The crude product was purified on silica (0 to 100% EtOAc in n-heptane), yielding 2.0 g (60.0%) of 61 as colourless foam.

[1463] LCMS-Method C:

[1464] UV-wavelength [nm]=220: Rₜ[min]=3.02

[1465] Ionization method: ES⁺: [M+H]⁺=519.4

### 62: [(2S,6R)-6-(4-amino-2-oxo-pyrimidin-1-yl)-2-(triisopropylsilyloxymethyl)-1,4-dioxan-2-yl]methyl benzoate

[1466] To a solution of 1.99 g (3.61 mmol) 61 in dry ACN were added 6.28 g (8.63 ml, 61.43 mmol) NEt₃ and 3.06 g (43.36 mmol) 1H-1,2,4-triazole. The reaction mixture was cooled to 0° C. and a solution of 1.66 g (1.01 ml, 10.84 mmol) POCl₃ in 15 ml dry ACN was added dropwise under vigorous stirring. After 1 h, the solvent was removed in vacuo and to the residue were added 150 ml of a sat. NaHCO₃/H₂O-mixture (1:1). The aqueous mixture was extracted 3× with DCM and the combined organic layers were dried with MgSO4. After evaporation of the solvent, the crude product was dissolved in 50 ml dry ACN followed by the addition of 50 ml of an aqueous NH₃-solution (32%). After stirring overnight (17 h), the solution was concentrated and the remaining aqueous mixture was extracted with DCM (2×100 ml). The combined organic layers were dried with MgSO₄. Evaporation of the solvent gave 1.93 g (quant., crude product) 62 as light yellow foam, which was used without further purification.

[1467] LCMS-Method C:

[1468] UV-wavelength [nm]=220: Rₜ[min]=2.59

[1469] Ionization method: ES⁺: [M+H]⁺=518.4

### 63f: [(2S,6R)-6-(4-benzamido-2-oxo-pyrimidin-1-yl)-2-(triisopropylsilyloxymethyl)-1,4-dioxan-2-yl]methyl benzoate

[1470] 1.93 g (3.72 mmol) of 62 were dissolved in 30 ml dry pyridine. At room temperature, 0.79 g (0.66 ml, 5.59 mmol) benzoyl chloride were added dropwise and the solution was stirred for 18 h, to achieve complete conversion. The solvent was removed in vacuo and the residue was dissolved in EtOAc. After washing with 10% aqueous citric acid solution (2×), sat. NaHCO₃- and NaCl-solution, the organic layer was dried with MgSO₄ and evaporated. The crude product was purified on silica (0 to 100% EtOAc in n-heptane), yielding 1.91 g (82.5%) of 63f as colourless foam.

[1471] LCMS-Method C:

[1472] UV-wavelength [nm]=220: Rₜ[min]=3.27

[1473] Ionization method: ES⁺: [M+H]⁺=622.5

### 50f: N-[1-[(2R,6R)-6-(hydroxymethyl)-6-(triisopropylsilyloxymethyl)-1,4-dioxan-2-yl]-2-oxo-pyrimidin-4-yl]benzamide

[1474] 952 mg (1.53 mmol) 63f were dissolved in 20 ml EtOH/pyridine (1:1). At 0° C., 9.19 ml (9.19 mmol) of a 1 M NaOH-solution were added and the solution was stirred at 0° C. for 3 h, when complete conversion was detected. The pH was brought to 6, using citric acid-monhydrate (approx. 650 mg, dissolved in 15 ml H₂O). After evaporation of the organic solvents, the aqueous layer was extracted with EtOAc. The organic phase was washed with aqueous citric acid (10%), H₂O and sat. NaCl-solution. After drying over MgSO₄ and evaporation, the crude product was purified on silica (0 to 100% EtOAc in n-heptane), yielding 678 mg (85.5%) of the title compound 50f as colourless foam.

[1475] LCMS-Method C:

[1476] UV-wavelength [nm]=220: Rₜ[min]=2.72

[1477] Ionization method: ES⁺: [M+H]⁺=518.2

### 51f: N-[1-[(2R,6S)-6-[[bis(4-methoxyphenyl)-phenyl-methoxy]methyl]-6-(triisopropyl-silyl-oxy-methyl)-1,4-dioxan-2-yl]-2-oxo-pyrimidin-4-yl]benzamide

[1478] 673 mg (1.30 mmol) 50f were dissolved in 20 ml DCM/pyridine (1:1). After adding 719 mg (2.08 mmol) DMT-Cl at room temperature, the solution was stirred for 2 h. The solvents were evaporated and the residue was dissolved in EtOAc. After washing with 2× aqueous citric acid (10%) and sat. NaHCO₃-solution, the organic layer was dried with MgSO₄ and concentrated in vacuo. The crude product was purified on silica (preconditioned with n-heptane+0.5% NEt₃, 0 to 70% EtOAc in n-heptane), yielding 975 mg (91.5%) of the DMT-ether 51f as light yellow foam.

[1479] LCMS-Method C:

[1480] UV-wavelength [nm]=220: Rₜ[min]=3.61

[1481] Ionization method: ES⁻: [M−H]⁻=818.4

### 52f: N-[1-[(2R,6S)-6-[[bis(4-methoxyphenyl)-phenyl-methoxy]methyl]-6-(hydroxymethyl)-1,4-dioxan-2-yl]-2-oxo-pyrimidin-4-yl]benzamide

[1482] 970 mg (1.18 mmol) 51f and 1.68 g (2.31 ml, 16.56 mmol) NEt₃ were dissolved in 20 ml THF. After the addition of 3.15 g (3.18 ml, 18.93 mmol) NEt₃.3 HF, the reaction was stirred at 65° C. for 48 h, to achieve complete conversion. After cooling to room temperature, the mixture was poured into 200 ml sat. NaHCO₃-solution and stirred for 1.5 h. After extraction with 2×100 ml DCM, the combined organic layers were dried with MgSO₄ and evaporated. Final purification on silica (0 to 100% EtOAc in n-heptane) gave 745 mg (94.9%) of 52f as colourless foam.

[1483] LCMS-Method C:

[1484] UV-wavelength [nm]=220: Rₜ[min]=2.61

[1485] Ionization method: ES⁺: [M+H]⁺=664.3

[1486] 1H-NMR (DMSO-d6, 600 MHz) δ[ppm]: 11.31 (br s, 1 H), 8.13 (br d, J=7.15 Hz, 1 H), 8.00 (d, J=7.66 Hz, 2 H), 7.63 (t, J=7.38 Hz, 1 H), 7.51 (t, J=7.79 Hz, 2 H), 7.36-7.42 (m, 3 H), 7.22-7.33 (m, 7 H), 6.87-6.91 (m, 4 H), 6.03 (dd, J=9.72, 3.12 Hz, 1 H), 4.84 (t, J=5.50 Hz, 1 H), 3.94 (dd, J=11.19, 3.12 Hz, 1 H), 3.84-3.89 (m, 1 H), 3.72-3.81 (m, 8 H), 3.56 (d, J=11.92 Hz, 1 H), 3.33-3.38 (m, 1 H), 3.16 (d, J=9.35 Hz, 1 H), 3.02 (d, J=9.17 Hz, 1 H).

### 53f: N-[1-[(2R,6S)-6-[[bis(4-methoxyphenyl)-phenyl-methoxy]methyl]-6-[[2-cyanoethoxy-(diisopropylamino)phosphanyl]oxymethyl]-1,4-dioxan-2-yl]-2-oxo-pyrimidin-4-yl]benzamide

[1487] 715 mg (1.08 mmol) starting compound 52f and 559 mg (3.23 mmol) diisopropylammonium tetrazolide were dissolved in 20 ml dry DCM. Under an Ar-atmosphere, 502 mg (529 μl, 1.62 mmol) 2-cyanoethyl N,N,N′,N′-tetraisopropylphosphoro-diamidite were added at room temperature and the solution was stirred for 16 h to achieve complete conversion. After adding 40 ml H₂O, the organic layer was separated and the aqueous phase was extracted with DCM. The combined organic layers were dried with MgSO₄ and evaporated. The crude product was purified on silica (preconditioned with n-heptane+1.0% NEt₃, 0 to 100% MTB-ether/DCM (1:1) in n-heptane), yielding 887 mg of title compound 53f as colourless foam.

[1488] 1H-NMR (DMSO-d6, 400 MHz) δ[ppm]: 11.30 (br s, 1 H), 8.15 (2×d, J=7.53 Hz, 1 H), 8.00 (m, 2 H), 7.63 (m, 1 H), 7.51 (m, 2 H), 7.20-7.44 (m, 10 H), 6.89 (br d, J=8.72 Hz, 4 H), 6.03-6.13 (m, 1 H), 3.78-4.17 (m, 4 H), 3.74 (s, 6 H), 3.35-3.71 (m, 6 H), 3.20 (m, 1 H), 3.03 (m, 1 H), 2.89 (m, 1 H), 2.72 (m, 1 H), 0.89-1.22 (m, 12 H).

[1489] 31P-NMR (DMSO-d6, 400 MHz) δ[ppm]: 148.2, 147.7.

[chemical structure]

### 50c: N-[9-[(2R,6R)-6-(hydroxymethyl)-6-(triisopropylsilyloxymethyl)-1,4-dioxan-2-yl]-6-oxo-1H-purin-2-yl]-2-methyl-propanamide

[1490] To a solution of DMT-ether 51c (9.5 g, 11.5 mmol; see synthetic scheme 12) in 190 ml anhydrous DCM, was added dropwise DCAA (29.7 g, 230 mmol) at 0° C. under N₂-atmosphere. After stirring at room temperature for 30 min, TLC showed complete conversion. The mixture was neutralized with sat.NaHCO₃-solution (100 ml) and extracted with DCM (3×200 ml). The organic layers were combined and washed with sat. NaCl-solution (200 ml). After drying with anhydrous Na₂SO₄, the organic solution was evaporated and the crude product was purified by preparative HPLC (ACN, 0.1% FA), yielding 9.5 g (61.2%) of the desired product 50c as white solid

[1491] LCMS-Method C:

[1492] UV-wavelength [nm]=220: Rₜ[min]=2.68

[1493] Ionization method: ES⁺: [M+H]⁺=524.4

[1494] 1H-NMR (DMSO-d6, 400 MHz) δ[ppm]: 12.10 (br s, 1 H), 11.53 (br s, 1 H), 8.21 (s, 1 H), 5.88 (dd, J=9.8, 3.3 Hz, 1 H), 4.75 (t, J=6.0 Hz, 1 H), 4.06 (d, J=9.5 Hz, 1 H), 3.98 (dd, J=11.4, 3.3 Hz, 1 H), 3.86 (d, J=11.7 Hz, 1 H), 3.74-3.83 (m, 2 H), 3.61 (d, J=11.7 Hz, 1 H), 3.46 (d, J=6.1 Hz, 2 H), 2.79 (m, 1 H), 1.00-1.16 (m, 27 H).

### 50e: N-[9-[(2R,6R)-6-(hydroxymethyl)-6-(triisopropylsilyloxymethyl)-1,4-dioxan-2-yl]purin-6-yl]benzamide

[1495] 615 mg (729 μmol) of the DMT-ether 51e were dissolved in 25 ml DCM. After adding 949 mg (608 μl, 7.3 mmol) dichloroacteic acid, the reaction mixture was stirred for 1 min to achieve complete conversion. The reaction solution was washed with 100 ml sat. NaHCO₃-solution. The organic layer was separated and the aqueous phase extracted twice with 35 ml DCM. The combined organic extracts were dried with MgSO₄ and evaporated. The crude product was purified by silica gel chromatography (0 to 100% EtOAc in n-heptane), yielding 302 mg (76.5%) of the desired product 50e as colourless foam.

[1496] LCMS-Method C:

[1497] UV-wavelength [nm]=220: Rₜ[min]=2.70

[1498] Ionization method: ES⁺: [M+H]⁺=542.5

[1499] 1H-NMR (DMSO-d6, 400 MHz) δ[ppm]: 11.20 (s, 1 H), 8.75 (s, 1 H), 8.69 (s, 1 H), 8.04 (d, J=7.5 Hz, 2 H), 7.65 (m, 1 H), 7.55 (m, 2 H), 6.23 (m, 1 H), 4.75 (t, J=6.1 Hz, 1 H), 4.01-4.12 (m, 3 H), 3.94 (d, J=9.9 Hz, 1 H), 3.86 (d, J=11.9 Hz, 1 H), 3.65 (d, J=11.7 Hz, 1 H), 3.44 (m, 2 H), 1.10-1.17 (m, 3 H), 1.04-1.09 (m, 18 H).

### 63a: [(2S,6R)-6-(5-methyl-2,4-dioxo-pyrimidin-1-yl)-2-(triisopropylsilyloxymethyl)-1,4-dioxan-2-yl]methyl benzoate

[1500] Following the protocol, described for compound 61 (Scheme 15), 1.0 g (2.33 mmol) of 50a gave 1.24 g (86.4%) of the benzoylated product 63a after purification on silica (0 to 100% EtOAc in n-heptane) as colourless foam.

[1501] LCMS-Method C:

[1502] UV-wavelength [nm]=220: Rₜ[min]=3.10

[1503] Ionization method: ES⁻: [M−H]⁻=531.6

### 63c: [(2S,6R)-6-[2-(2-methylpropanoylamino)-6-oxo-1H-purin-9-yl]-2-(triisopropylsilyloxy-methyl)-1,4-dioxan-2-yl]methyl benzoate

[1504] 2.80 g (5.35 mmol) of the starting material 50c were dissolved in 20 ml dry pyridine. After adding 949 mg (784 μl, 6.68 mmol) benzoyl chloride and 667 mg (5.35 mmol) DMAP, the reaction solution was stirred at room temperature for 4 h. Another 189 mg (157 μl, 1.37 mmol) benzoyl chloride were added and the reaction was stirred overnight to achieve complete conversion. The solvent was removed i. vac., the residue was dissolved in EtOAc and washed with 5% aqueous citric acid solution, 5% aqueous NaHCO₃- and sat. NaCl-solution. After drying with MgSO₄, the organic layer was evaporated and the crude product purified on silicagel (0 to 10% MeOH in DCM), yielding 3.33 g (99.2%) of the benzoylester 63c as colourless foam.

[1505] LCMS-Method C:

[1506] UV-wavelength [nm]=220: Rₜ[min]=3.06

[1507] Ionization method: ES⁺: [M+H]⁺=628.5

[1508] 1H-NMR (DMSO-d6, 400 MHz) δ[ppm]: 11.84 (s, 1 H), 11.58 (s, 1 H), 8.09 (s, 1 H), 7.79-7.86 (m, 2 H), 7.56-7.64 (m, 1 H), 7.41-7.49 (m, 2 H), 5.89 (dd, J=5.9 Hz, 3.4 Hz, 1 H), 4.18-4.32 (m, 3 H), 4.07 (m, 1 H), 3.77-4.02 (m, 4 H), 2.79 (m, 1 H), 0.93-1.21 (m, 27 H).

### 63e: [(2S,6R)-6-[6-(dibenzoylamino)purin-9-yl]-2-(triisopropylsilyloxymethyl)-1,4-dioxan-2-yl]methyl benzoate

[1509] To a solution of 299 mg (552 μmol) of the free alcohol 50e in 10 ml dry pyridine were added 94.0 mg (77.7 μl, 662.3 μmol) of benzoyl chloride at room temperature. After 18 h, the solvent was concentrated to a volume of 5 ml and another 94.0 mg of benzoyl chloride were added. Additional 282 mg benzoyl chloride were added after another 60 min at room temperature and the solution was stirred overnight. The solvent was removed and the residue was treated with H₂O and EtOAc. The organic layer was separated and washed twice with citric acid-solution (10%), sat. NaHCO₃- and sat. NaCl-solution. After drying with MgSO₄, the solvent was removed and the crude product was purified on silica (0 to 100% EtOAc in n-heptane), which gave 405 mg (97.8%) of 63e as colourless foam.

[1510] LCMS-Method C:

[1511] UV-wavelength [nm]=220: Rₜ[min]=3.49

[1512] Ionization method: ES⁺: [M+H]⁺=750.7

[1513] 1H-NMR (DMSO-d6, 400 MHz) δ[ppm]: 8.74 (s, 1 H), 8.62 (s, 1 H), 7.92-7.97 (m, 2 H), 7.74-7.79 (m, 4 H), 7.42-7.67 (m, 9 H), 6.28 (dd, J=9.4, 3.4 Hz, 1 H), 4.22-4.35 (m, 4 H), 4.16 (m, 1 H), 4.01 (m, 2 H), 3.78 (m, 1 H), 1.06-1.14 (m, 3 H), 0.97-1.05 (m, 18 H).

### 64a: [(2S,6R)-2-(hydroxymethyl)-6-(5-methyl-2,4-dioxo-pyrimidin-1-yl)-1,4-dioxan-2-yl]-methyl benzoate

[1514] 1.07 g (2.01 mmol) of 63a were dissolved in 20 ml THF. At room temperature, 1.53 g (1.39 ml, 10.03 mmol) pyridine HF (65%) were added and the mixture was stirred for 18 h. After adding another 3.06 g (2.78 ml, 20.06 mmol) pyridine HF (65%), the solution was stirred at 65° C. for 5 h, when complete conversion was detected. The reaction mixture was poured into 250 ml sat. NaHCO₃-solution. After stirring for 1 h, the mixture was extracted with DCM (3×50 ml). The combined organic layers were dried with MgSO₄ and evaporated. The crude product was purified on silica (0 to 100% EtOAc in n-heptane), yielding 680 mg (90.0%) of 64a as colourless foam.

[1515] LCMS-Method C:

[1516] UV-wavelength [nm]=220: Rₜ[min]=1.46

[1517] Ionization method: ES⁻: [M−H]⁻=375.3

### 64c: [(2S,6R)-2-(hydroxymethyl)-6-[2-(2-methylpropanoylamino)-6-oxo-1H-purin-9-yl]-1,4-dioxan-2-yl]methyl benzoate

[1518] 3.30 g (5.26 mmol) of the silylether 63c were dissolved in 33 ml DMF. After adding 8.06 g (78.9 mmol, 11.1 ml) NEt₃ and 6.49 g (39.4 mmol, 6.56 ml) NEt₃.3HF, the solution was stirred at 75° C. for 2 h, to achieve complete conversion. The reaction was cooled to room temperature and washed with 100 ml 5%-NaHCO₃-solution. After filtration, the aqueous solution was extracted with DCM. The organic layer was separated, dried with MgSO₄ and evaporated. The crude product was purified by HPLC (column: Chiralcel OD-H/74, 250×4.6 mm, 1.0 ml/min, 30° C.; eluent:heptane/EtOH 5:2), which gave 1.20 g (48.4%) of the desired product 64c as colourless solid.

[1519] LCMS-Method C:

[1520] UV-wavelength [nm]=220: Rₜ[min]=1.40

[1521] Ionization method: ES⁺: [M+H]⁺=472.3

[1522] 1H-NMR (DMSO-d6, 400 MHz) δ[ppm]: 11.89 (s, 1 H), 11.67 (s, 1 H), 8.08 (s, 1 H), 7.87 (d, J=7.7 Hz, 2 H), 7.62 (t, J=7.2 Hz, 1 H), 7.47 (t, J=7.6 Hz, 2 H), 5.92 (dd, J=6.6, 3.3 Hz, 1 H), 5.11 (t, J=5.7 Hz, 1 H), 4.14-4.26 (m, 3 H), 4.03 (dd, J=12.0, 3.4 Hz, 1 H), 3.90 (d, J=12.0 Hz, 1 H), 3.79 (d, J=12.0 Hz, 1 H), 3.70 (m, 2 H), 2.79 (spt, J=6.8 Hz, 1 H), 1.15 (d, J=6.9 Hz, 3 H), 1.11 (d, J=6.7 Hz, 3 H).

### 64e: [(2S,6R)-6-[6-(dibenzoylamino)purin-9-yl]-2-(hydroxymethyl)-1,4-dioxan-2-yl]methyl benzoate

[1523] 402 mg (536 μmol) of the silylether 63e were deprotected using the protocol described for 52e (Scheme 13). After chromatographic purifictaion on silica (0 to 100% EtOAc in n-heptane), 194 mg (61.0%) of the desired product 64e were isolated as colourless foam.

[1524] LCMS-Method C:

[1525] UV-wavelength [nm]=220: Rₜ[min]=2.22

[1526] Ionization method: ES⁺: [M+H]⁺=594.5

[1527] 1H-NMR (DMSO-d6, 400 MHz) δ[ppm]: 8.71 (s, 1 H), 8.59 (s, 1 H), 7.97 (m, 2 H), 7.77 (m, 4 H), 7.43-7.67 (m, 9 H), 6.27 (m, 1 H), 5.14 (m, 1 H), 4.20-4.36 (m, 3 H), 4.12 (m, 1 H), 3.95 (m, 1 H), 3.75-3.91 (m, 3 H).

### 64f: [(2S,6R)-6-(4-benzamido-2-oxo-pyrimidin-1-yl)-2-(hydroxymethyl)-1,4-dioxan-2-yl]-methyl benzoate

[1528] Following the protocol, described for compound 64a, using 10.0 eq. of pyridine-HF, 952 mg (1.53 mmol) of 63f gave 471 mg (66.1%) of 64f as colourless foam.

[1529] LCMS-Method C:

[1530] UV-wavelength [nm]=220: Rₜ[min]=1.89

[1531] Ionization method: ES⁺: [M+H]⁺=466.1

### 65a: [(2R,6R)-2-[[bis(4-methoxyphenyl)-phenyl-methoxy]methyl]-6-(5-methyl-2,4-dioxo-pyrimidin-1-yl)-1,4-dioxan-2-yl]methyl benzoate

[1532] 675 mg (1.79 mmol) 64a were dissolved in 10 ml DCM/pyridine (1:1). After adding a solution of 806 mg (2.33 mmol) DMT-Cl in 15 ml DCM, the reaction solution was stirred at room temperature for 5.5 h, followed by the addition of another 403 mg (1.17 mmol) DMT-Cl. Stirring was continued for 18 h, when complete conversion was detected. The solvents were evaporated and the residue was dissolved in EtOAc. After washing 2× with aqueous citric acid (10%) and sat. NaHCO₃-solution, the organic layer was dried with MgSO₄ and concentrated in vacuo. The crude product was purified on silica (preconditioned with n-heptane+0.5% NEt₃, 0 to 100% EtOAc in n-heptane), yielding 1.15 g (94.1%) of the DMT-ether 65a as colourless foam.

[1533] LCMS-Method C:

[1534] UV-wavelength [nm]=220: Rₜ[min]=2.76

[1535] Ionization method: ES⁻: [M−H]⁻=677.3

### 65c: [(2R,6R)-2-[[bis(4-methoxyphenyl)-phenyl-methoxy]methyl]-6-[2-(2-methylpropanoyl-amino)-6-oxo-1H-purin-9-yl]-1,4-dioxan-2-yl]methyl benzoate

[1536] 1.20 g (2.55 mmol) of the primary alcohol 64c were dissolved in 25 ml dry pyridine. 647 mg (6.36 mmol, 891 μl) NEt₃ and 1.78 g (5.09 mmol) DMT-Cl were added and the solution was stirred for 1 h at room temperature, followed by 4 h at 80° C. After cooling to room temperature, 1 ml MeOH was added and the solution was diluted with EtOAc. The organic solution was washed with 10% aqueous citric acid- and sat. NaCl-solution. After drying the organic phase with MgSO₄, the solvent was evaporated and the crdue product purified by silicagel chromatography (0 to 5% MeOH in DCM), which gave 1.97 g (quant.) of the desired DMT-ether 65c as light yellow solid.

[1537] LCMS-Method C:

[1538] UV-wavelength [nm]=220: Rₜ[min]=2.75

[1539] Ionization method: ES⁺: [M+H]⁺=774.4

[1540] 1H-NMR (DMSO-d6, 400 MHz) δ[ppm]: 11.78 (s, 1 H), 11.53 (s, 1 H), 8.06 (s, 1 H), 7.50-7.55 (m, 2 H), 7.31-7.41 (m, 5 H), 7.14-7.29 (m, 7 H), 6.81 (br d, J=8.9 Hz, 2 H), 6.77 (d, J=8.9 Hz, 2 H), 5.72 (m, 1 H), 4.19-4.35 (m, 3 H), 4.01-4.11 (m, 3 H), 3.66 (s, 3 H), 3.63 (s, 3 H), 3.34 (d, J=8.8 Hz, 1 H), 3.16 (d, J=8.7 Hz, 1 H), 2.75 (m, 1 H), 1.13 (d, J=6.9 Hz, 3 H), 1.08 (d, J=6.7 Hz, 3 H).

### 65e: [(2R,6R)-2-[[bis(4-methoxyphenyl)-phenyl-methoxy]methyl]-6-[6-(dibenzoylamino)-purin-9-yl]-1,4-dioxan-2-yl]methyl benzoate

[1541] 190 mg (320 μmol) of the starting material 64e were dissolved in 10 ml dry pyridine and evaporated. This procedure was repeated three times. The compound was then dissolved in 10 ml dry pyridine, followed by the addition of 48.7 mg (66.9 μl, 480 μmol) NEt₃ and 166 mg (480 μmol) DMT-Cl. After stirring overnight at room temperature, another 97.4 mg NEt₃ and 332 mg DMT-Cl were added and the solution was stirred for additional 18 h to achieve complete conversion. The solvent was removed in vacuo and the residue dissolved in EtOAc. After washing with H₂O, citric acid solution (2×), sat. NaHCO₃- and sat. NaCl-solution, the organic phase was dried with MgSO₄. Evaporation of the solvent and purification by silicagel chromatography (0 to 100% EtOAc in n-heptane) gave 216 mg (75.3%) of the DMT-ether 65e as light yellow foam.

[1542] LCMS-Method C:

[1543] UV-wavelength [nm]=220: Rₜ[min]=3.17

[1544] Ionization method: ES⁺: [M+H]⁺=896.5

[1545] 1H-NMR (DMSO-d6, 400 MHz) δ[ppm]: 8.75 (s, 1 H), 8.61 (s, 1 H), 7.73-7.80 (m, 7 H), 7.65 (m, 1 H), 7.58 (m, 2 H), 7.42-7.50 (m, 6 H), 7.36-7.41 (m, 2 H), 7.22-7.29 (m, 6 H), 6.78-6.84 (m, 4 H), 6.07 (m, 1 H), 4.36 (m, 2 H), 4.22 (m, 1 H), 3.99-4.14 (m, 2 H), 3.84 (d, J=11.9 Hz, 1 H), 3.68 (s, 6 H), 3.44-3.57 (m, 2 H).

### 65f: [(2R,6R)-6-(4-benzamido-2-oxo-pyrimidin-1-yl)-2-[[bis(4-methoxyphenyl)-phenyl-methoxy]methyl]-1,4-dioxan-2-yl]methyl benzoate

[1546] Following the protocol described for 65a, 467 mg (1.00 mmol) of starting compound 64f were DMT-protected, yielding 677 mg (87.9%) of 65f as colourless foam.

[1547] LCMS-Method C:

[1548] UV-wavelength [nm]=220: Rₜ[min]=2.95

[1549] Ionization method: ES⁻: [M−H]⁻=766.4

### 66a: 1-[(2R,6R)-6-[[bis(4-methoxyphenyl)-phenyl-methoxy]methyl]-6-(hydroxymethyl)-1,4-dioxan-2-yl]-5-methyl-pyrimidine-2,4-dione

[1550] The starting compound 65a (580 mg, 0.85 mmol) was dissolved in 25 ml THF/MeOH (4:1). At room temperature, 4.27 ml (8.55 mmol) of a 2 M NaOH-solution were added and the reaction was stirred for 30 min. The pH was brought to 7 using solid citric acid-monohydrate and sat. NaHCO₃-solution. The organic solvents were removed in vacuo and the aqueous phase was extracted with DCM (2×30 ml). The combined organic layers were dried with MgSO₄. After evaporation, 481 mg (98.0%, crude) of the title compound 66a were obtained as colourless solid, which was used without further purification.

[1551] LCMS-Method A:

[1552] UV-wavelength [nm]=220: Rₜ[min]=1.82

[1553] Ionization method: ES⁻: [M−H]⁻=573.3

[1554] 1H-NMR (DMSO-d6, 400 MHz) δ[ppm]: 11.35 (s, 1 H), 7.63 (s, 1 H), 7.39 (d, J=7.34 Hz, 2 H), 7.20-7.33 (m, 7 H), 6.89 (d, J=8.31 Hz, 4 H), 5.75 (m, 1 H), 4.83 (t, J=5.81 Hz, 1 H), 3.74 (s, 6 H), 3.57-3.72 (m, 4 H), 3.51-3.56 (m, 2 H), 3.20-3.29 (m, 2 H), 1.79 (d, J=0.86 Hz, 3 H).

### 66c: N-[9-[(2R,6R)-6-[[bis(4-methoxyphenyl)-phenyl-methoxy]methyl]-6-(hydroxymethyl)-1,4-dioxan-2-yl]-6-oxo -1H-purin-2-yl]-2-methyl-propanamide

[1555] 1.97 g (2.55 mmol) of the benzoylester 65c were dissolved in 40 ml EtOH/pyridine (3:1). After adding 12.9 ml (25.8 mmol) of a 2 M NaOH-solution, the mixture was stirred at room temperature for 30 min to achieve complete conversion. After neutralizing with citric acid (solid), the EtOH was removed i.vac. and the residue was diluted with 50 ml EtOAc and 25 ml H₂O. The precipitate was removed by filtration and from the filtrate, the organic layer was separated and washed with sat. NaCl-solution. After drying with MgSO₄, the solvent was removed and the crude product purified on silica (0 to 5% MeOH in DCM), yielding 0.99 g (58.0%) of the title compound 66c as colourless foam.

[1556] LCMS-Method C:

[1557] UV-wavelength [nm]=220: Rₜ[min]=2.46

[1558] Ionization method: ES⁺: [M+H]⁺=670.4

[1559] 1H-NMR (DMSO-d6, 400 MHz) δ[ppm]: 12.10 (s, 1 H), 11.52 (s, 1 H), 8.19 (s, 1 H), 7.20-7.42 (m, 9 H), 6.85-6.93 (m, 4 H), 5.62 (dd, J=9.7, 3.3 Hz, 1 H), 4.81 (br t, 1 H), 3.91-3.99 (m, 2 H), 3.74 (s, 3 H), 3.73 (s, 3 H), 3.65-3.76 (m, 1 H), 3.41-3.59 (m, 4 H), 3.15 (d, J=9.1 Hz, 1 H), 2.77 (m, 1 H), 1.13 (m, 6 H).

### 66e: N-[9-[(2R,6R)-6-[[bis(4-methoxyphenyl)-phenyl-methoxy]methyl]-6-(hydroxymethyl)-1,4-dioxan-2-yl]purin-6-yl]benzamide

[1560] The starting material 65e (213 mg, 238 μmol) was dissolved in 8 ml EtOH/pyridine (3:1). After the addition of 1.19 ml (2.4 mmol) 2 M NaOH at 0° C., the solution was stirred for 10 min at 0° C. and 60 min at room temperature to achieve complete conversion. 166 mg citric acid-monohydrate were added, followed by the addition of 50 ml H₂O and 50 ml EtOAc. The organic layer was separated and washed with 10% citric acid-solution (2×), H₂O, sat. NaHCO₃- and sat. NaCl-solution. After drying with MgSO₄, the crude product was purified on silica (0 to 100% acetone in DCM), yielding 134 mg (82.0%) of 66e as colourless foam.

[1561] LCMS-Method C:

[1562] UV-wavelength [nm]=220: Rₜ[min]=2.44

[1563] Ionization method: ES⁺: [M+H]⁺=688.4

[1564] 1H-NMR (DMSO-d6, 400 MHz) δ[ppm]: 11.21 (br s, 1 H), 8.72 (s, 1 H), 8.67 (s, 1 H), 8.04 (m, 2 H), 7.65 (m, 1 H), 7.55 (m, 2 H), 7.45 (m, 2 H), 7.29-7.37 (m, 6 H), 7.23 (m, 1 H), 6.91 (dd, J=9.0, 2.0 Hz, 4 H), 6.01 (m, 1 H), 4.84 (t, J=5.9 Hz, 1 H), 3.94-4.02 (m, 2 H), 3.83 (m, 1 H), 3.74 (s, 6 H), 3.68-3.73 (m, 1 H), 3.49-3.55 (m, 2 H), 3.38 (m, 2 H).

### 66f: N-[1-[(2R,6R)-6-[[bis(4-methoxyphenyl)-phenyl-methoxy]methyl]-6-(hydroxymethyl)-1,4-dioxan-2-yl]-2-oxo-pyrimidin-4-yl]benzamide

[1565] 672 mg (0.88 mmol) 65f were dissolved in 20 ml EtOH/pyridine (1:1). At 0° C., 5.25 ml (5.25 mmol) of a 1 M NaOH-solution were added and the reaction was stirred for 1 h. The pH was brought to 7, using an aqueous citric acid solution. After adding 200 ml EtOAc and H₂O, the organic phase was separated and washed 2× with aqueous citric acid solution (10%), H₂O and NaCl-solution. After drying with MgSO₄ and evaporation of the solvent, the crude product was purified on silica (preconditioned with n-heptane+0.5% NEt₃, 0 to 100% EtOAc in n-heptane), yielding 555 mg (95.5%) of the title compound 66f as colourless foam.

[1566] LCMS-Method C:

[1567] UV-wavelength [nm]=220: Rₜ[min]=2.49

[1568] Ionization method: ES⁻: [M−H]⁻=662.3

[1569] 1H-NMR (DMSO-d6, 600 MHz) δ[ppm]: 11.28 (br s, 1 H), 8.31 (br d, J=6.79 Hz, 1 H), 8.00 (d, J=7.66 Hz, 2 H), 7.63 (t, J=7.43 Hz, 1 H), 7.52 (t, J=7.79 Hz, 2 H), 7.39 (m, 3 H), 7.21-7.33 (m, 7 H), 6.87-6.91 (m, 4 H), 5.80 (dd, J=9.81, 3.21 Hz, 1 H), 4.89 (t, J=5.96 Hz, 1 H), 3.85 (dd, J=11.19, 3.12 Hz, 1 H), 3.79 (m, 1 H), 3.74 (s, 6 H), 3.64 (d, J=11.92 Hz, 1 H), 3.59 (m, 2 H), 3.26-3.30 (m, 2 H), 3.20 (t, J=10.55 Hz, 1 H).

### 67a: 3-[[(2R,6R)-2-[[bis(4-methoxyphenyl)-phenyl-methoxy]methyl]-6-(5-methyl-2,4-dioxo-pyrimidin-1-yl)-1,4-dioxan-2-yl]methoxy-(diisopropylamino)phosphanyl]oxypropanenitrile

[1570] Following the protocol described for 53a (Scheme 13), 380 mg (0.66 mmol) of the starting compound 66a were transferred to the phosphoroamidite 67a. After precipitation from diethylether/n-pentane, 342 mg (66.7%) of the title compound 67a was isolated as colourless solid.

[1571] 1H-NMR (DMSO-d6, 400 MHz) δ[ppm]: 11.40, 11.39 (2×s, 1 H), 7.63, 7.61 (2×s, 1 H), 7.40 (m, 2 H), 7.21-7.35 (m, 7 H), 6.83-6.96 (m, 4 H), 5.77-5.87 (m, 1 H), 3.36-3.90 (m, 17 H), 3.12-3.28 (m, 1 H), 2.66-2.77 (m, 2 H), 1.81-1.79 (2×s, 3 H), 1.02-1.17 (m, 12 H). 31P-NMR (DMSO-d6, 162 MHz) δ[ppm]: 148.5, 148.1.

### 67c: N-[9-[(2R,6R)-6-[[bis(4-methoxyphenyl)-phenyl-methoxy]methyl]-6-[[2-cyanoethoxy-(diisopropylamino)phosphanyl]oxymethyl]-1,4-dioxan-2-yl]-6-oxo-1H-purin-2-yl]-2-methyl-propanamide

[1572] 985 mg (1.47 mmol) of the starting material 66c were dissolved in 30 ml dry DCM. Under an Ar-atmosphere, 133 mg (735 μmol) ⁱPr₂NH-tetrazole and 571 mg (1.84 mmol, 602 μl) 2-cyanoethyl-N,N,N′,N′-tetraisopropylphosphorodiamidite were added and the solution was stirred at room temperature overnight. After adding 50 ml H₂O and DCM, the organic layer was separated, dried with MgSO₄ and evaporated. The crude product was purified by silicagel chromatography (preconditioned with n-heptane+1% NEt₃, 0 to 100% EtOAc in n-heptane), yielding 1.07 g (83.8%) of the desired phosphoramidite 67c as colourless foam.

[1573] LCMS-Method C:

[1574] UV-wavelength [nm]=220: Rₜ[min]=2.42

[1575] Ionization method: ES⁺: [M+H−ⁱPr₂N+011]⁺=787.4

[1576] 1H-NMR (DMSO-d6, 400 MHz) δ[ppm]: 12.08 (br s, 1 H), 11.55 (br s, 1 H), 8.06, 8.05 (2×s, 1 H), 7.18-7.44 (m, 9 H), 6.82-6.94 (m, 4 H), 5.65 (m, 1 H), 3.66-4.01 (m, 3 H), 3.73 (s, 3 H), 3.72 (s, 3 H), 3.35-3.65 (m, 6 H), 3.21-3.29 (m, 1 H), 2.72-2.83 (m, 1 H), 2.59-2.72 (m, 2 H), 0.90-1.22 (m, 20 H).

[1577] 31P-NMR (DMSO-d6, 162 MHz) δ[ppm]: 147.7, 147.3.

### 67e: N-[9-[(2R,6R)-6-[[bis(4-methoxyphenyl)-phenyl-methoxy]methyl]-6-[[2-cyanoethoxy-(diisopropylamino)phosphanyl]oxymethyl]-1,4-dioxan-2-yl]purin-6-yl]benzamide

[1578] 131 mg (190 μmol) of the starting compound 66e were phosphitylated following the protocol described for its stereoisomer 53e (Scheme 13), which gave the desired phosphoramidite 67e in quantitative yield.

[1579] LCMS-Method B-3:

[1580] UV-wavelength [nm]=220: Rₜ[min]=0.61

[1581] Ionization method: ES⁺: [M+H-ⁱPr2N+011]⁺=805.3

[1582] 1H-NMR (DMSO-d6, 400 MHz) δ[ppm] 11.20 (br s, 1 H), 8.74, 8.73 (2×s, 1 H), 8.62, 8.60 (2×s, 1 H), 8.05 (d, J=7.4 Hz, 2 H), 7.65 (m, 1 H), 7.55 (m, 2 H), 7.45 (d, J=7.3 Hz, 2 H), 7.29-7.36 (m, 6 H), 7.24 (m, 1 H), 6.91 (m, 4 H), 6.06 (m, 1 H), 3.99-4.14 (m, 2 H), 3.62-3.90 (m, 11 H), 3.37-3.62 (m, 5 H), 2.71 (m, 1 H), 2.64 (m, 1 H), 1.06-1.13 (m, 6 H), 1.03 (d, J=6.7 Hz, 3 H), 0.97 (m, 3 H).

[1583] 31P-NMR (DMSO-d6, 162 MHz) δ[ppm]: 147.7, 147.6.

### 67f: N-[1-[(2R,6R)-6-[[bis(4-methoxyphenyl)-phenyl-methoxy]methyl]-6-[[2-cyanoethoxy-(diisopropylamino)phosphanyl]oxymethyl]-1,4-dioxan-2-yl]-2-oxo-pyrimidin-4-yl]benzamide

[1584] Following the protocol described for 53f (Scheme 15), 525 mg (0.79 mmol) of the starting material 66f were transferred to the phosphoroamidite 67f. After chromatographic purification on silica (preconditioned with n-heptane+1.0% NEt₃, 0 to 100% MTB-ether/DCM (1:1) in n-heptane), 620 mg (90.7%) of the title compound 67f were isolated as colourless foam.

[1585] 1H-NMR (DMSO-d6, 400 MHz) δ[ppm]: 11.31 (br s, 1 H), 8.22 (m, 1 H), 8.01 (d, J=7.59 Hz, 2 H), 7.57-7.69 (m, 1 H), 7.52 (m, 2 H), 7.39 (m, 3 H), 7.20-7.34 (m, 7 H), 6.86-6.92 (m, 4 H), 5.88 (m, 1 H), 3.39-3.95 (m, 11 H), 3.74 (s, 6 H), 3.26-3.34 (m, 0.5 H), 3.17-3.24 (m, 0.5 H), 2.71-2.77 (m, 1 H), 2.64-2.69 (m, 1 H), 1.03-1.24 (m, 12 H).

[1586] 31P-NMR (DMSO-d6, 162 MHz) δ[ppm]: 147.5, 147.3.

[chemical structure]

### 68: 1-[(2R,6S)-6-(hydroxymethyl)-6-(triisopropylsilyloxymethyl)-1,4-dioxan-2-yl]pyrimidine-2,4-dione

[1587] 980 mg (1.89 mmol) of starting material 58 were dissolved in 40 ml THF/MeOH (4:1). At 0° C., 9.45 ml (18.90 mmol) of a 2 M NaOH-solution were added and the reaction was stirred at 0° C. for 1 h. The solution was brought to pH 7 by adding solid citric acid (approx. 1.33 g). The organic solvent were removed in vacuo and the aqueous residue was extracted with 100 ml EtOAc. The organic layer was separated and washed with sat. NaHCO₃-solution and dried with MgSO₄. After evaporation of the solvent, the crude product was purified on silica (0 to 5% MeOH in DCM), yielding 603 mg (77.0%) 68 as colourless foam.

[1588] LCMS-Method A:

[1589] UV-wavelength [nm]=220: Rₜ[min]=1.90

[1590] Ionization method: ES⁺: [M+H]⁺=415.3

### 69: 1-[(2R,6R)-6-[[bis(4-methoxyphenyl)-phenyl-methoxy]methyl]-6-(triisopropylsilyloxy-methyl)-1,4-dioxan-2-yl]pyrimidine-2,4-dione

[1591] 597 mg (1.44 mmol) 68 and 931 mg (1.26 ml, 7.20 mmol) DIPEA were dissolved in 20 ml DCM. After adding 622 mg (1.80 mmol) DMT-Cl, the solution was stirred at room temperature for 22 h to achieve complete conversion. The solvent was removed in vacuo and the crude product purified on silica (preconditioned with n-heptane+0.5% NEt₃, 0 to 100% EtOAc in n-heptane), yielding 860 mg (83.3%) of the DMT-ether 69 as colourless foam.

[1592] LCMS-Method A:

[1593] UV-wavelength [nm]=220: Rₜ[min]=2.25

[1594] Ionization method: ES⁺: [M+Na]⁺=739.4

### 66b: 1-[(2R,6R)-6-[[bis(4-methoxyphenyl)-phenyl-methoxy]methyl]-6-(hydroxymethyl)-1,4-dioxan-2-yl]pyrimidine-2,4-dione

[1595] 854 mg (1.19 mmol) 69 was added to a solution of 5.26 g (7.23 ml, 51.49 mmol) NEt₃ and 9.55 g (9.66 ml, 57.46 mmol) NEt₃.3 HF in 17 ml NMP. After stirring for 2 h at 65° C., the reaction was left at room temperature overnight. The reaction solution was poured into 450 ml H₂O/sat. NaHCO₃-solution (1:1) and the solution was extracted with 2×100 ml EtOAc. The combined organic layers were washed with H₂O and sat. NaCl-solution. After drying with MgSO₄, the crude product was purified on silica (preconditioned with n-heptane+0.5% NEt_{3, 10} to 100% EtOAc in n-heptane), yielding 666 mg (99.7%) of the title compound 66b as colourless foam.

[1596] LCMS-Method A:

[1597] UV-wavelength [nm]=220: Rₜ[min]=1.76

[1598] Ionization method: ES⁺: [M+Na]⁺=583.3

[1599] 1H-NMR (DMSO-d6, 400 MHz) δ[ppm]: 11.37 (s, 1 H), 7.79 (d, J=8.07 Hz, 1 H), 7.35-7.45 (m, 2 H), 7.20-7.33 (m, 7 H), 6.89 (2×d, J=8.93, 4 H), 5.72 (dd, J=10.09, 3.24 Hz, 1 H), 5.62-5.68 (m, 1 H), 4.84 (t, J=5 .7 5 Hz, 1 H), 3.74 (s, 6 H), 3.71 (m, 2 H), 3.47-3.63 (m, 3 H), 3.14-3.30 (m, 3 H).

### 67b: 3-[[(2R,6R)-2-[[bis(4-methoxyphenyl)-phenyl-methoxy]methyl]-6-(2,4-dioxopyrimidin-1-yl)-1,4-dioxan-2-yl]methoxy-(diisopropylamino)phosphanyl]oxypropanenitrile

[1600] 650 mg (1.16 mmol) starting compound 66b and 110 mg (0.64 mmol) diisopropylammonium tetrazolide were dissolved in 16 ml dry DCM. Under an Ar-atmosphere, 396 mg (418 μl, 1.28 mmol) 2-cyanoethyl N,N,N′,N′-tetraisopropylphosphoro-diamidite were added at room temperature and the solution was stirred for 16 h. The solvent was removed and the residue was dissolved in EtOAc and washed with H₂O and sat. NaHCO₃-solution. After drying with MgSO₄, the solvent was evaporated and the crude product was dissolved in 15 ml methyl-tert.-butylether. Under stirring, the organic solution was dropped into 120 ml n-pentane. The precipitate was filtered and dried at 40° C. i. vac., yielding 827 mg (93.7%) of the title compound 67b as colourless solid.

[1601] 1H-NMR (DMSO-d6, 400 MHz) δ[ppm]: 11.39 (br s, 1 H), 7.74 (m, 1 H), 7.35-7.44 (m, 2 H), 7.18-7.35 (m, 7 H), 6.84-6.92 (m, 4 H), 5.73-5.86 (m, 1 H), 5.67 (m, 1 H), 3.54-3.89 (m, 7 H), 3.74 (s, 6 H), 3.35-3.53 (m, 4 H), 3.12-3.28 (m, 1 H), 2.62-2.76 (m, 2 H), 1.02-1.16 (m, 12 H).

[1602] 31P-NMR (DMSO-d6, 162 MHz) δ[ppm]: 148.5, 148.1.

[1603] C: Syntheses of Targeted Nucleotide Analogs of Formula I

[chemical structure]

[chemical structure]

### 71: [(3aR,5R,6R,7R,7aR)-6,7-diacetoxy-2-methyl-5,6,7,7a-tetrahydro-3aH-pyrano[3,2-d]oxazol-5-yl]methyl acetate

[1604] To a solution of 20.0 g (51.4 mmol) D-galactosamine pentaacetate (70) in 200 ml DCE was added 17.1 g (77.1 mmol) TMSOTf dropwise at 30° C. The mixture was heated to 50° C. for 2 h. After standing overnight at room temperature, complete conversion was detected. The mixture was quenched by a solution of NaHCO₃ (8.63 g, 102.8 mmol) in 11 water and extracted with 2×500 ml DCM. The combined organic layers were dried over anhydrous Na₂SO₄, filtered and concentrated in vacuo, yielding 19.0 g of the title compound 71 (crude), which were used without further purification.

[1605] LCMS-Method A:

[1606] ELSD: Rₜ[min]=0.90

[1607] Ionization method: ES⁺: [M+H]⁺=330.1

### 72g: 12-Benzyloxydodecan-1-ol

[1608] 14.05 g (68.76 mmol) 1,12-dodecanediol were dissolved in 150 ml dry DMF. At 0° C., 2.75 g (68.76 mmol) NaH (60%) were added over a period of 30 min in four portions. The ice bath was removed and the solution was stirred for 3 h at room temperature, followed by the addition of a solution of 10.0 g (6.99 ml, 57.33 mmol) benzylbromide in 50 ml dry DMF at 0° C. The reaction was stirred overnight at room temperature. After adding another 1.99 g (49.8 mmol) of NaH (60%), stirring was continued for 4 h. The reaction mixture was poured into 500 ml ice-water and and extracted with diethylether and EtOAc. The organic layers were washed with sat. NaCl-solution, dried with MgSO₄ and evaporated. The crude product was purified on silica (0 to 60% EtOAc in n-heptane) to yield 6.91 g (41.2%) of the title compound 72g as white solid.

[1609] LCMS-Method A:

[1610] UV-wavelength [nm]=220: Rₜ[min]=2.09

[1611] Ionization method: ES⁺: [M+H]⁺=293.3

[1612] General procedure D for the preparation of compounds 73a to 73g

[1613] To a solution of oxazoline 71 (1.0 eq.) in dry DCE (200 ml/50.0 mmol) and the alcohol 72a-72g (1.10 eq.) were added molecular sieves 4 Å (20.0 g). At room temperature, TMSOTf (0.5 eq.) was added dropwise and the solution was stirred until complete conversion was achieved. The reaction was quenched by adding a solution of NaHCO₃ (2.0 eq.) in 400 ml H₂O. The organic phase was separated and the aqueous layer was extracted with 2×100 ml DCM. The combined organic extracts were dried with Na₂SO₄ and concentrated in vacuo. The crude products were purified by silicagel chromatography to yield the glycosides 73a to 73g.

### 73a: [(2R,3R,4R,5R,6R)-5-acetamido-3,4-diacetoxy-6-(2-benzyloxyethoxy)tetrahydropyran-2-yl]methyl acetate

[1614] Following general procedure D, 17.0 g (51.37 mmol) 71 and 8.6 g (56.56 mmol) 72a gave 18.87 g (76.4%) of the title compound 73a after silicagel chromatography (PE/EtOAc 1:2) as yellow oil.

[1615] 1H-NMR (DMSO-d6, 400 MHz) □[ppm]: 7.83 (d, J=9.29 Hz, 1 H), 7.41-7.20 (m, 5 H), 5.22 (d, J=3.30 Hz, 1 H), 4.98 (dd, J=11.25, 3.42 Hz, 1 H), 4.58 (d, J=8.44 Hz, 1 H), 4.52-4.43(m, 2 H), 4.03 (s, 2 H), 3.96-3.80 (m, 2 H), 3.69-3.49 (m, 3 H), 2.12-2.08 (m, 3 H), 1.99 (s, 3 H), 1.89 (s, 3 H), 1.74 (s, 3 H).

### 73b: [(2R,3R,4R,5R,6R)-5-acetamido-3,4-diacetoxy-6-[2-(2-benzyloxyethoxy)ethoxy]-tetra-hydropyran-2-yl]methyl acetate

[1616] Following general procedure D, 14.0 g (42.5 mmol) 71 and 7.5 g (38.2 mmol) 72b gave 10.6 g (48%) of the title compound 73b after silicagel chromatography as yellow oil.

[1617] MS: Ionization method: ES⁺: [M+H]⁺=526.3

### 73c: [(2R,3R,4R,5R,6R)-5-acetamido-3,4-diacetoxy-6-[2-[2-(2-benzyloxyethoxy)ethoxy]-ethoxy]tetrahydropyran-2-yl]methyl acetate

[1618] Following general procedure D, 16.0 g (48.6 mmol) 71 and 14.0 g (58.3 mmol) 72c gave 15.6 g (57%) of the title compound 73c after silicagel chromatography as colourless oil.

[1619] MS: Ionization method: ES⁺: [M+H]⁺=570.1

### 73d: [(2R,3R,4R,5R,6R)-5-acetamido-3,4-diacetoxy-6-[2-[2-[2-(2-benzyloxyethoxy)-ethoxy]-ethoxy]ethoxy]tetrahydropyran-2-yl]methyl acetate

[1620] Following general procedure D, 19.0 g (51.4 mmol) 71 and 17.5 g (61.7 mmol) 72d gave 10.0 g (32%) of the title compound 73d after silicagel chromatography as colourless oil.

[1621] 1H-NMR (DMSO-d6, 400 MHz) δ[ppm]: 7.79 (d, J=9.3 Hz, 1 H), 7.40-7.25 (m, 5 H), 5.27-5.20 (m, 1 H), 5.22 (d, J=3.3 Hz, 1 H), 4.98 (dd, J=3.4, 11.2 Hz, 1 H), 4.49 (s, 2 H), 4.08-3.99 (m, 3 H), 3.94-3.75 (m, 2 H), 3.62-3.43 (m, 16 H), 2.15-2.07 (m, 3 H), 2.00 (s, 3 H), 1.90 (s, 3 H), 1.78 (s, 3 H).

### 73e: [(2R,3R,4R,5R,6R)-5-acetamido-3,4-diacetoxy-6-[2-[2-[2-[2-(2-benzyloxyethoxy)-ethoxy]ethoxy]ethoxy]ethoxy]tetrahydropyran-2-yl]methyl acetate

[1622] Following general procedure D, 35.0 g (64.2 mmol, 60% puritiy) 71 and 23.2 g (70.6 mmol) 72e gave 13.4 g (32%) of the title compound 73e after silicagel chromatography as yellow oil.

[1623] 1H-NMR (CDCl₃, 400 MHz) δ[ppm]: 7.44-7.29 (m, 5 H), 6.63 (d, J=9.29 Hz, 1 H), 5.33 (d, J=2.76 Hz, 1 H), 5.01 (dd, J=11.17, 3.39 Hz, 1 H), 4.80 (d, J=8.66 Hz, 1 H), 4.58 (s, 2 H), 4.33-4.01 (m, 4 H), 3.98-3.80 (m, 3 H), 3.77-3.54 (m, 20 H), 2.18-2.16 (m, 3 H) 1.99 (s, 6 H) 1.87 (s, 3 H).

### 73f: [(2R,3R,4R,5R,6R)-5-acetamido-3,4-diacetoxy-6-(5-benzyloxypentoxy)tetrahydropyran-2-yl]methyl acetate

[1624] Following general procedure D, 1.69 g (5.13 mmol) 71 and 1.10 g (1.09 ml, 5.39 mmol) 72f gave 2.60 g (96.7%) of the title compound 73f after silicagel chromatography (0 to 10% MeOH in DCM) as colourless oil.

[1625] 1H-NMR (CDCl₃, 400 MHz) δ[ppm]: 7.36-7.28 (m, 6 H), 5.24 (d, J=12.0 Hz, 1 H), 5.37 (d, J=2.4 Hz, 1 H), 5.34-5.31 (m, 1 H), 4.71 (d, J=8.0 Hz, 1 H), 4.51 (s, 2 H), 4.17-4.14 (m, 2 H), 3.93-3.90 (m, 3 H), 3.50-3.47 (m, 3 H), 2.15 (s, 3 H), 2.06 (s, 3 H), 1.92 (s, 3 H), 1.68 (s, 3 H), 1.66-1.61 (m, 4 H), 1.48-1.44 (m, 2 H).

### 73g: [(2R,3R,4R,5R,6R)-5-acetamido-3,4-diacetoxy-6-(12-benzyloxydodecoxy)tetrahydro-pyran-2-yl]methyl acetate

[1626] Following general procedure D, 4.16 g (12.62 mmol) 71 and 4.43 g (15.14 mmol) 72g gave 5.69 g (72.6%) of the title compound 73g after silicagel chromatography (10 to 100% DCM in EtOAc) as light yellow oil.

[1627] LCMS-Method A:

[1628] UV-wavelength [nm]=220: Rₜ[min]=2.07

[1629] Ionization method: ES⁺: [M+H]⁺=622.4

[1630] General procedure E for the preparation of compounds 74a to 74g

[1631] The benzylethers 73a-g were dissolved in THF (40 mmol in 370 ml). After adding 5 g Pd/C (10%, containing 50% H₂O), the mixture was stirred at room temperature under an atmosphere of H₂ (15psi) until complete debenzylation was observed. The mixture was filtered and the filtrate was evaporated in vacuo. Final purification on silica gave the desired title compounds 74a-g.

### 74a: [(2R,3R,4R,5R,6R)-5-acetamido-3,4-diacetoxy-6-(2-hydroxyethoxy)tetrahydropyran-2-yl]methyl acetate

[1632] Following general procedure E, 18.87 g (39.19 mmol) 73a gave 11.6 g (75.8%) 74a after purification on silica (EtOAc/MeOH 10:1) as colourless solid.

[1633] 1H-NMR (DMSO-d6, 400 MHz) δ[ppm]: 7.81 (br d, J=9.03 Hz, 1 H), 5.22 (br d, J=2.38 Hz, 1 H), 4.98 (br dd, J=10.98, 2.57 Hz, 1 H), 4.66-4.44 (m, 2 H), 4.04 (s, 3 H), 3.94-3.79 (m, 1 H), 3.68 (br d, J=4.64 Hz, 1 H), 3.49 (br s, 3 H), 2.11 (s, 3 H), 2.01 (s, 3 H), 1.90 (s, 3 H), 1.78 (s, 3 H).

### 74b: [(2R,3R,4R,5R,6R)-5-acetamido-3,4-diacetoxy-6-[2-(2-hydroxyethoxy)ethoxy]-tetra-hydropyran-2-yl]methyl acetate

[1634] Following general procedure E, 10.6 g (20.1 mmol) 73b gave 8.0 g (92.0%) 74b without additional purification as colourless oil.

[1635] 1H-NMR (DMSO-d6, 400 MHz) δ[ppm]: 7.80 (d, J=9.2 Hz, 1 H), 5.22 (d, J=3.3 Hz, 1 H), 4.98 (dd, J=3.4, 11.3 Hz, 1 H), 4.64-4.53 (m, 2 H), 4.11-4.00 (m, 3 H), 3.94-3.83 (m, 1 H), 3.82-3.73 (m, 1 H), 3.61 (dt, J=3.2, 7.1 Hz, 1 H), 3.56-3.46 (m, 4 H), 3.44-3.38 (m, 2 H), 2.11 (s, 3 H), 2.01 (s, 3 H), 1.90 (s, 3 H), 1.78 (s, 3 H).

### 74c: [(2R,3R,4R,5R,6R)-5-acetamido-3,4-diacetoxy-6-[2-[2-(2-hydroxyethoxy)ethoxy]-ethoxy]tetrahydropyran-2-yl]methyl acetate

[1636] Following general procedure E, 15.6 g (27.4 mmol) 73c were hydrogenated in a mixed solvent of 200 ml EtOAc/THF (1:1), which gave 11.0 g (84.6%) 74c without additional purification as colourless oil.

[1637] 1H-NMR (DMSO-d6, 400 MHz) δ[ppm]: 7.80 (d, J=9.2 Hz, 1 H), 5.22 (d, J=3.3 Hz, 1 H), 4.98 (dd, J=3.4, 11.2 Hz, 1 H), 4.62-4.52 (m, 2 H), 4.09-4.00 (m, 4 H), 3.89 (td, J=8.9, 11.0 Hz, 1 H), 3.82-3.74 (m, 1 H), 3.63-3.56 (m, 1 H), 3.55-3.46 (m, 8 H), 3.45-3.39 (m, 2 H), 2.11 (s, 3 H), 2.01 (s, 3 H), 1.91-1.88 (m, 3 H), 1.78 (s, 3 H), 1.18 (t, J=7.1 Hz, 1 H).

### 74d: [(2R,3R,4R,5R,6R)-5-acetamido-3,4-diacetoxy-6-[2-[2-[2-(2-hydroxyethoxy)ethoxy]-ethoxy]ethoxy]tetrahydropyran-2-yl]methyl acetate

[1638] (Following general procedure E, 10.0 g (16.3 mmol) 73d were hydrogenated in 100 EtOAc, yielding 8.7 g (93.0%) 74d without additional purification as colourless oil.

[1639] 1H-NMR (DMSO-d6, 400 MHz) δ[ppm]: 7.80 (d, J=9.2 Hz, 1 H), 5.22 (d, J=3.3 Hz, 1 H), 4.97 (dd, J=3.4, 11.2 Hz, 1 H), 4.62-4.53 (m, 2 H), 4.09-3.98 (m, 4 H), 3.89 (td, J=9.0, 10.9 Hz, 1 H), 3.82-3.75 (m, 1 H), 3.63-3.56 (m, 1 H), 3.55-3.46 (m, 12 H), 3.42 (d, J=5.0 Hz, 2 H), 2.11 (s, 3 H), 2.00 (s, 3 H), 1.92-1.87 (m, 3 H), 1.78 (s, 3 H).

### 74e: [(2R,3R,4R,5R,6R)-5-acetamido-3,4-diacetoxy-6-[2-[2-[2-[2-(2-hydroxyethoxy)ethoxy]-ethoxy]ethoxy]ethoxy]tetrahydropyran-2-yl]methyl acetate

[1640] Following general procedure E, 12.4 g (18.9 mmol) 73e were hydrogenated in 250 EtOAc, yielding 9.7 g (83.9%) 74e after final purification on silica (DCM/MeOH 15:1) as yellow oil.

[1641] 1H-NMR (CDCl₃, 400 MHz) δ[ppm]: 6.96 (br d, J=9.29 Hz, 1 H), 5.35-5.32 (m, 1 H), 5.05 (dd, J=11.17, 3.39 Hz, 1 H), 5.09-5.02 (m, 1 H), 4.74 (d, J=8.66 Hz, 1 H), 4.27 (dt, J=11.04, 8.97 Hz, 1 H), 4.20-4.11 (m, 2 H), 4.01-3.91 (m, 3 H), 3.84-3.59 (m, 21 H), 2.95 (br s, 2 H), 2.17-2.15 (m, 3 H), 2.05 (s, 3 H), 2.01-1.98 (m, 6 H).

### 74f: [(2R,3R,4R,5R,6R)-5-acetamido-3,4-diacetoxy-6-(5-hydroxypentoxy)tetrahydropyran-2-yl]methyl acetate

[1642] 2.50 g (4.77 mmol) 73f were hydrogenated in 13 ml THF in the presence of 168 mg (239 μmol) Pd(OH)₂/C (20%) at room temperature under 4 bar H₂-atmosphere until complete conversion was achieved. The reaction mixture was filtered and the filtrate evaporated, yielding 2.08 g (quant., crude) of the title compound 74f.

[1643] LCMS-Method A:

[1644] ELSD: Rₜ[min]=1.15

[1645] Ionization method: ES⁻: [M−H+formic acid]⁻=478.2

### 74g: [(2R,3R,4R,5R,6R)-5-acetamido-3,4-diacetoxy-6-(12-hydroxydodecoxy)tetrahydro-pyran-2-yl]methyl acetate

[1646] 5.69 g (9.14 mmol) of the benzylether 73g were hydrogenated following the protocol described for 74f, yielding 4.79 g (98.5%) of the title compound 74g as colourless oil, which crystallized to white needles.

[1647] LCMS-Method A:

[1648] ELSD: Rₜ[min]=1.72

[1649] Ionization method: ES⁺: [M−H⁺]⁺=532.3

### 75a: [(2R,3R,4R,5R,6R)-5-acetamido-3,4-diacetoxy-6-(2-oxoethoxy)tetrahydropyran-2-yl]-methyl acetate

[1650] To a solution of 0.75 g (1.92 mmol) of the starting material 74a in 10 ml DCM, were added 6.77 g (4.97 ml, 2.40 mmol) 1,1,1-Triacetoxy-1,1-dihydro-1,2-benziodoxol-3(1H)-on (Dess-Martin periodinane). After the solution was stirred for 2 h at room temperature, the solvent was removed and the residue purified on silica (EtOAc/DCM 1:1 to EtOAc/DCM/MeOH 5:5:2), yielding 591 mg (79.2%) of the title compound 75a.

[1651] LCMS-Method C:

[1652] ELSD Rₜ[min]=0.86

[1653] Ionization method: ES⁺: [M+H]⁺=390.2

### 75b: [(2R,3R,4R,5R,6R)-5-acetamido-3,4-diacetoxy-6-[2-(2-oxoethoxy)ethoxy]tetrahydro-pyran-2-yl]methyl acetate

[1654] Following the protocol described for 75a, 1.0 g (2.30 mmol) of 74b were oxidized with 8.12 g (5.96 ml, 2.87 mmol) 1,1,1-Triacetoxy-1,1-dihydro-1,2-benziodoxo1-3(1H)-on (Dess-Martin periodinane). Final purification on silica (EtOAc/DCM 1:1 to EtOAc/DCM/MeOH 5:5:2) gave 1.0 g (quant.) of the title compound 75b.

[1655] LCMS-Method B2:

[1656] MS TIC Rₜ[min]=0.35

[1657] Ionization method: ES⁺: [M+H]⁺=434.1

### 75c: [(2R,3R,4R,5R,6R)-5-acetamido-3,4-diacetoxy-6-[2-[2-(2-oxoethoxy)ethoxy]ethoxy]-tetrahydropyran-2-yl]methyl acetate

[1658] 596 mg (542 μl, 7.59 mmol) DMSO were dissolved in 11 ml dry DCM. After cooling to −60° C., 1.75 ml (3.50 mmol) of a 2 M solution of oxalylchloride in dry DCM were added and stirring was continued for 10 minutes, followed by the addition of a solution of 1.40 g (2.92 mmol) of the alcohol 74c in 11 ml dry DCM. The mixture was stirred for another 10 minutes at −60° C. and 2.97 g (4.08 ml, 29.2 mmol) NEt₃ were added. The cooling bath was removed and the reaction mixture was allowed to reach room temperature. After complete conversion, the solution was diluted with 25 ml DCM and washed with sat. NaHCO₃-solution. The organic layer was separated, dried with MgSO₄ and the solvent was removed, which gave 1.27 g (91.1%, crude) of the desired aldehyde 75c as colourless oil, which was used without further purification.

[1659] LCMS-Method B2:

[1660] ELSD Rₜ[min]=1.66

[1661] Ionization method: ES⁺: [M+H]⁺=478.2

### 75d: [(2R,3R,4R,5R,6R)-5-acetamido-3,4-diacetoxy-6-[2-[2-[2-(2-oxoethoxy)ethoxy]ethoxy]-ethoxy]tetrahydropyran-2-yl]methyl acetate

[1662] Following the protocol described for 75c, 1.10 g (2.10 mmol) of the alcohol 74d were oxidized, yielding 0.99 g (90.3%, crude) of the aldehyde 75d as colourless oil.

[1663] LCMS-Method C:

[1664] ELSD Rₜ[min]=1.69

[1665] Ionization method: ES⁺: [M+H]⁺=522.2

### 75e: [(2R,3R,4R,5R,6R)-5-acetamido-3,4-diacetoxy-6-[2-[2-[2-[2-(2-oxoethoxy)ethoxy]-ethoxy]ethoxy]ethoxy]tetrahydropyran-2-yl]methyl acetate

[1666] Following the protocol described for 75c, 1.10 g (1.94 mmol) of the alcohol 74e were oxidized, yielding 1.10 g (quant., crude) of the aldehyde 75e as colourless oil.

[1667] LCMS-Method A:

[1668] ELSD Rₜ[min]=1.50

[1669] Ionization method: ES⁺: [M+H]⁺=566.4

### 75f: [(2R,3R,4R,5R,6R)-5-acetamido-3,4-diacetoxy-6-(5-oxopentoxy)tetrahydropyran-2-yl]-methyl acetate

[1670] Following the protocol described for 75c, 2.05 g (4.73 mmol) of the alcohol 74f were oxidized, yielding 2.05 g (quant., crude) of the aldehyde 75f as colourless oil.

[1671] LCMS-Method A:

[1672] ELSD Rₜ[min]=1.19

[1673] Ionization method: ES⁻: [M−H+formic acid]⁻=476.2

### 75g: [(2R,3R,4R,5R,6R)-5-acetamido-3,4-diacetoxy-6-(12-oxododecoxy)tetrahydropyran-2-yl]methyl acetate

[1674] Following the protocol described for 75c, 2.20 g (4.14 mmol) of the alcohol 74g were oxidized, yielding 2.19 g (99.9%, crude) of the aldehyde 75g as colourless oil.

[1675] LCMS-Method A:

[1676] ELSD Rₜ[min]=1.79

[1677] Ionization method: ES⁻: [M−H+formic acid]⁻=574.3

[1678] General procedure F for the syntheses of compounds 76a to 76g

[1679] 1.0 eq. of the starting aldehyde 75a to 75g was dissolved in MeOH (20 ml/1.0 mmol). At room temperature, 5 g molecular sieves (4 Å), 4.0 eq. NEt₃ and 10.0 eq. AcOH were added, followed by the addition of 1.0 eq. of the morpholine 24a. The reaction solution was stirred for 15 minutes and 4.0 eq. of sodium cyanoboronhydride were added over a period of 2 h (4 portions). The reaction was stirred at room temperature overnight to achieve complete conversion. The mixture was filtered and the filtrate was poured into 50 ml of sat. NaHCO₃-solution. The MeOH was evaporated and the aqueous mixture was extracted twice with DCM. The organic layers were dried with MgSO₄, the solvent was removed in vacuo and the crude product purified by silicagel chromatography to yield the title compounds 76a to 76g.

### 76a: [(2R,3R,4R,5R,6R)-5-acetamido-3,4-diacetoxy-6-[2-[(2S,6R)-2-[[bis(4-methoxyphenyl)-phenyl-methoxy]methyl]-6-(5-methyl-2,4-dioxo-pyrimidin-1-yl)-2-(triisopropylsilyloxy-methyl)morpholin-4-yl]ethoxy]tetrahydropyran-2-yl]methyl acetate

[1680] 580 mg (745 μmol) of the starting aldehyde 75a gave 510 mg (62.1%) of the title compound 76a, following general procedure F and final purification on silica (0 to 10% MeOH in DCM) as colourless foam.

[1681] LCMS-Method C:

[1682] UV-wavelength [nm]=220: Rₜ[min]=3.30

[1683] Ionization method: ES⁺: [M+H]⁺=1104.0

### 76b: [(2R,3R,4R,5R,6R)-5-acetamido-3,4-diacetoxy-6-[2-[2-[(2S,6R)-2-[[bis(4-methoxy-phenyl)-phenyl-methoxy]methyl]-6-(5-methyl-2,4-dioxo-pyrimidin-1-yl)-2-(triisopropyl-silyloxy-methyl)morpholin-4-yl]ethoxy]ethoxy]tetrahydropyran-2-yl]methyl acetate

[1684] 500 mg (577 μmol) of the starting aldehyde 75b gave 352 mg (53.2%) of the title compound 76b, following general procedure F and final purification on silica (EtOAc/DCM 1:1 to EtOAc/DCM/MeOH 5:5:1) as colourless foam.

[1685] LCMS-Method C:

[1686] UV-wavelength [nm]=220: Rₜ[min]=3.27

[1687] Ionization method: ES⁺: [M+H]⁺=1148.0

### 76c: [(2R,3R,4R,5R,6R)-5-acetamido-3,4-diacetoxy-6-[2-[2-[2-[(2S,6R)-2-[[bis(4-methoxy-phenyl)-phenyl-methoxy]methyl]-6-(5-methyl-2,4-dioxo-pyrimidin-1-yl)-2-(triisopropylsilyl-oxymethyl)morpholin-4-yl]ethoxy]ethoxy]ethoxy]tetrahydropyran-2-yl]methyl acetate

[1688] 900 mg (1.88 mmol) of the starting aldehyde 75c gave 1.34 g (59.5%) of the title compound 76c, following general procedure F and final purification on silica (0 to 10% MeOH in DCM) as colourless foam.

[1689] LCMS-Method C:

[1690] UV-wavelength [nm]=220: Rₜ[min]=3.29

[1691] Ionization method: ES⁻: [M−H]⁻=1189.9

### 76d: [(2R,3R,4R,5R,6R)-5-acetamido-3,4-diacetoxy-6-[2-[2-[2-[2-[(2S,6R)-2-[[bis(4-methoxyphenyl)-phenyl- methoxy]methyl]-6-(5-methyl-2,4-dioxo-pyrimidin-1-yl)-2-(triisopropyl-silyloxymethyl)morpholin-4-yl]ethoxy]ethoxy]ethoxy]ethoxy]tetrahydropyran-2-yl]methyl acetate

[1692] 840 mg (1.61 mmol) of the starting aldehyde 75d gave 835 mg (42.0%) of the title compound 76d, following general procedure F and final purification on silica (0 to 10% MeOH in DCM) as colourless foam.

[1693] LCMS-Method C:

[1694] UV-wavelength [nm]=220: Rₜ[min]=3.30

[1695] Ionization method: ES⁺: [M+H]⁺=1235.8

### 74e: [(2R,3R,4R,5R,6R)-5-acetamido-3,4-diacetoxy-6-[2-[2-[2-[2-[2-[(2S,6R)-2-[[bis(4- methoxyphenyl)-phenyl-methoxy]methyl]-6-(5-methyl-2,4-dioxo-pyrimidin-1-yl)-2-(triiso-propylsilyloxymethyl)morpholin-4-yl]ethoxy]ethoxy]ethoxy]ethoxy]ethoxy]tetrahydropyran-2-yl]methyl acetate

[1696] 1.09 g (1.54 mmol, purity 80%) of the starting aldehyde 75e gave 1.12 g (56.8%) of the title compound 76e, following general procedure F and final purification on silica (0 to 10% MeOH in DCM) as colourless foam.

[1697] LCMS-Method A:

[1698] UV-wavelength [nm]=220: Rₜ[min]=2.20

[1699] Ionization method: ES⁺: [M+H]⁺=1279.9

### 76f: [(2R,3R,4R,5R,6R)-5-acetamido-3,4-diacetoxy-6-[5-[(2S,6R)-2-[[bis(4-methoxyphenyl)-phenyl-methoxy]methyl]-6-(5-methyl-2,4-dioxo-pyrimidin-1-yl)-2-(triisopropylsilyloxy-methyl)morpholin-4-yl]pentoxy]tetrahydropyran-2-yl]methyl acetate

[1700] 1.0 g (2.32 mmol) of the starting aldehyde 75f gave 2.18 g (82.1%) of the title compound 76f, following general procedure F and final purification on silica (0 to 10% MeOH in DCM) as colourless foam.

[1701] 1H-NMR (DMSO-d6, 400 MHz) δ[ppm]: 11.44 (s, 1 H), 7.84-7.77 (m, 1 H), 7.62 (s, 1 H), 7.42 (d, J=7.6 Hz, 2 H), 7.33-7.18 (m, 8 H), 6.84 (d, J=8.8 Hz, 4 H), 5.88 (dd, J=2.4, 10.0 Hz, 1 H), 5.22 (d, J=3.6 Hz, 1 H), 4.98 (dd, J=3.2, 11.2 Hz, 1 H), 4.52-4.47 (m, 1 H), 4.11 (d, J=9.6 Hz, 1 H), 4.07-3.97 (m, 4 H), 3.93-3.83 (m, 2 H), 3.80-3.65 (m, 8 H), 3.47-3.38 (m, 1 H), 3.11 (d, J=9.2 Hz, 1 H), 2.97 (d, J=9.2 Hz, 1 H), 2.90 (d, J=8.8 Hz, 1 H), 2.79 (d, J=11.2 Hz, 1 H), 2.29 (t, J=7.2 Hz, 2 H), 2.14-2.04 (m, 5 H), 2.02-1.95 (m, 3 H), 1.90 (s, 3 H), 1.82-1.73 (m, 6 H), 1.57-1.22 (m, 6 H), 1.01-0.83 (m, 21 H).

### 76g: [(2R,3R,4R,5R,6R)-5-acetamido-3,4-diacetoxy-6-[12-[(2S,6R)-2-[[bis(4-methoxy-phenyl)-phenyl-methoxy]methyl]-6-(5-methyl-2,4-dioxo-pyrimidin-1-yl)-2-(triisopropylsilyloxy-methyl)morpholin-4-yl]dodecoxy]tetrahydropyran-2-yl]methyl acetate

[1702] 2.19 g (4.13 mmol) of the starting aldehyde 75g gave 4.84 g (94.3%) of the title compound 76g, following general procedure F and final purification on silica (0 to 100% MeOH/EtOAc (9:1) in n-heptane) as colourless foam.

[1703] LCMS-Method B-2:

[1704] UV-wavelength [nm]=220: Rₜ[min]=1.14

[1705] Ionization method: ES⁺: [(M+2H)/2]⁺=622.5

[1706] General procedure G for the synthesis of compounds 77a-g and 83a-e

[1707] 1.0 eq. of the TIPS-protected starting compounds 76a-e (82a-e, see Scheme 20) were dissolved in NMP (14 ml/1.0 mmol). After adding 15.0 eq. triethyl amine and 6.0 eq. NEt₃.3 HF, the reaction mixture was stirred at 90° C. until complete conversion was achieved. After the solution was cooled to room temperature, sat. NaHCO₃-solution was added and the mixture was extracted three times with EtOAc. The combined organic layers were washed with sat. NaCl-solution and dried with MgSO₄. After evaporation of the solvent, the crude product was purified on silica, yielding the deprotected products 77a-g (83a-e, s. Scheme 20).

### 77a: [(2R,3R,4R,5R,6R)-5-acetamido-3,4-diacetoxy-6-[2-[(2R,6R)-2-[[bis(4-methoxyphenyl)-phenyl-methoxy]methyl]-2-(hydroxymethyl)-6-(5-methyl-2,4-dioxo-pyrimidin-1-yl)morpholin-4-yl]ethoxy]tetrahydropyran-2-yl]methyl acetate

[1708] Following general procedure G, 850 mg (770 μmol) of the TIPS-ether 76a were deprotected, yielding 401 mg (55.0%) of the title compound 77a after silicagel chroma-tography (EtOAc/DCM 1:1 to EtOAc/DCM/MeOH 5:5:1).

[1709] LCMS-Method C:

[1710] UV-wavelength [nm]=220: Rₜ[min]=2.16

[1711] Ionization method: ES⁺: [M+H]⁺=947.8

[1712] 1H-NMR (DMSO-d6, 600 MHz) δ[ppm]: 11.37 (s, 1 H), 7.78 (d, J=9.17 Hz, 1 H), 7.53 (s, 1 H), 7.40 (d, J=7.52 Hz, 2 H), 7.18-7.32 (m, 7 H), 6.87 (d, J=8.99 Hz, 4 H), 5.85 (dd, J=9.90, 3.12 Hz, 1 H), 5.20 (d, J=3.48 Hz, 1 H), 4.96 (dd, J=11.19, 3.48 Hz, 1 H), 4.57 (t, J=5.32 Hz, 1 H), 4.52 (d, J=8.44 Hz, 1 H), 3.99-4.06 (m, 3 H), 3.79-3.91 (m, 2 H), 3.72-3.76 (m, 7 H), 3.66 (dd, J=11.10, 5.78 Hz, 1 H), 3.59 (dt, J=11.51, 5.52 Hz, 1 H), 3.00 (s, 2 H), 2.90 (br d, J=9.35 Hz, 1 H), 2.76 (br d, J=11.55 Hz, 1 H), 2.51-2.60 (m, 2 H), 2.25 (d, J=11.37 Hz, 1 H), 2.17 (t, J=10.64 Hz, 1 H), 2.04 (m, 3 H), 1.97 (m, 3 H), 1.88 (s, 3 H), 1.70 (s, 3 H), 1.69 (s, 3 H).

### 77b: [(2R,3R,4R,5R,6R)-5-acetamido-3,4-diacetoxy-6-[2-[2-[(2R,6R)-2-[[bis(4-methoxy-phenyl)-phenyl-methoxy]methyl]-2-(hydroxymethyl)-6-(5-methyl-2,4-dioxo-pyrimidin-1-yl)morpholin-4-yl]ethoxy]ethoxy]tetrahydropyran-2-yl]methyl acetate

[1713] Following general procedure G, 720 mg (635 μmol) of the TIPS-ether 76b were deprotected, yielding 527 mg (83.7%) of the title compound 77b after silicagel chroma-tography (EtOAc/DCM 1:1 to EtOAc/DCM/MeOH 5:5:1).

[1714] LCMS-Method C:

[1715] UV-wavelength [nm]=220: Rₜ[min]=2.12

[1716] Ionization method: ES⁺: [M+H]⁺=991.9

[1717] 1H-NMR DMSO-d6, 600 MHz) δ[ppm]: 11.36 (s, 1 H), 7.79 (d, J=9.17 Hz, 1 H), 7.55 (s, 1 H), 7.40 (d, J=7.70 Hz, 2 H), 7.21-7.31 (m, 7 H), 6.87 (d, J=8.80 Hz, 4 H), 5.85 (br d, J=7.34 Hz, 1 H), 5.21 (d, J=3.30 Hz, 1 H), 4.98 (dd, J=11.19, 3.30 Hz, 1 H), 4.61 (br s, 1 H), 4.54 (d, J=8.62 Hz, 1 H), 3.99-4.04 (m, 3 H), 3.83-3.90 (m, 1 H), 3.72-3.79 (m, 8 H), 3.55-3.67 (m, 2 H), 3.48-3.55 (m, 4 H), 3.01 (s, 2 H), 2.90 (br d, J=10.09 Hz, 1 H), 2.80 (br d, J=12.10 Hz, 1 H), 2.51-2.55 (m, 2 H), 2.27 (br d, J=11.74 Hz, 1 H), 2.15-2.21 (m, 1 H), 2.09 (s, 3 H), 1.98 (s, 3 H), 1.89 (s, 3 H), 1.76 (s, 3 H), 1.67 (s, 3 H).

### 77c: [(2R,3R,4R,5R,6R)-5-acetamido-3,4-diacetoxy-6-[2-[2-[2-[(2R,6R)-2-[[bis(4-methoxy-phenyl)-phenyl-methoxy]methyl]-2-(hydroxymethyl)-6-(5-methyl-2,4-dioxo-pyrimidin-1-yl)morpholin-4-yl]ethoxy]ethoxy]ethoxy]tetrahydropyran-2-yl]methyl acetate

[1718] Following general procedure G, 1.25 g (1.05 mmol) of the TIPS-ether 76c were deprotected, yielding 630 mg (58.0%) of the title compound 77c after silicagel chroma-tography (EtOAc/DCM 1:1 to EtOAc/DCM/MeOH 5:5:1).

[1719] LCMS-Method C:

[1720] UV-wavelength [nm]=220: Rₜ[min]=2.11

[1721] Ionization method: ES⁺: [M+H]⁺=1035.6

[1722] 1H-NMR (DMSO-d6, 600 MHz) δ[ppm]: 11.36 (s, 1 H), 7.77 (d, J=9.17 Hz, 1 H), 7.55 (s, 1 H), 7.40 (d, J=7.34 Hz, 2 H), 7.20-7.31 (m, 7 H), 6.87 (d, J=8.62 Hz, 4 H), 5.85 (dd, J=9.72, 3.12 Hz, 1 H), 5.21 (d, J=3.48 Hz, 1 H), 4.97 (dd, J=11.19, 3.30 Hz, 1 H), 4.60 (t, J=5.41 Hz, 1 H), 4.54 (d, J=8.62 Hz, 1 H), 4.00-4.06 (m, 3 H), 3.84-3.91 (m, 1 H), 3.71-3.77 (m, 8 H), 3.59-3.67 (m, 1 H), 3.42-3.57 (m, 9 H), 3.01 (s, 2 H), 2.92 (br d, J=9.54 Hz, 1 H), 2.80 (br d, J=11.55 Hz, 1 H), 2.51-2.56 (m, 2 H), 2.27 (d, J=11.55 Hz, 1 H), 2.17 (t, J=10.45 Hz, 1 H), 2.10 (s, 3 H), 1.99 (s, 3 H), 1.89 (s, 3 H), 1.76 (m, 3 H), 1.67 (m, 3 H).

### 77d: [(2R,3R,4R,5R,6R)-5-acetamido-3,4-diacetoxy-6-[2-[2-[2-[2-[(2R,6R)-2-(hydroxy-methyl)-2-[[(4-hydroxyphenyl)-(4-methoxyphenyl)-phenyl-methoxy]methyl]-6-(5-methyl-2,4-dioxo-pyrimidin-1-yl)morpholin-4-yl]ethoxy]ethoxy]ethoxy]ethoxy]tetrahydropyran-2-yl]methyl acetate

[1723] Following general procedure G, 780 mg (631 μmol) of the TIPS-ether 76d were deprotected, yielding 450 mg (66.1%) of the title compound 77d after silicagel chromatography (EtOAc/DCM 1:1 to EtOAc/DCM/MeOH 5:5:1).

[1724] LCMS-Method C:

[1725] UV-wavelength [nm]=220: Rₜ[min]=2.12

[1726] Ionization method: ES⁺: [M+H]⁺=1079.7

[1727] 1H-NMR (DMSO-d6, 600 MHz) δ[ppm]: 11.36 (s, 1 H), 7.77 (d, J=9.17 Hz, 1 H), 7.55 (s, 1 H), 7.40 (d, J=7.34 Hz, 2 H), 7.20-7.31 (m, 7 H), 6.87 (d, J=8.80 Hz, 4 H), 5.84 (dd, J=9.72, 3.12 Hz, 1 H), 5.21 (d, J=3.48 Hz, 1 H), 4.97 (dd, J=11.28, 3.39 Hz, 1 H), 4.60 (t, J=5.32 Hz, 1 H), 4.55 (d, J=8.44 Hz, 1 H), 4.00-4.06 (m, 3 H), 3.85-3.91 (m, 1 H), 3.72-3.78 (m, 8 H), 3.61-3.66 (m, 1 H), 3.55-3.60 (m, 1 H), 3.43-3.54 (m, 12 H), 3.00 (s, 2 H), 2.92 (br d, J=8.99 Hz, 1 H), 2.81 (br d, J=11.19 Hz, 1 H), 2.51-2.56 (m, 2 H), 2.28 (d, J=11.74 Hz, 1 H), 2.15-2.21 (m, 1 H), 2.10 (s, 3 H), 1.99 (s, 3 H), 1.89 (m, 3 H), 1.77 (s, 3 H), 1.67 (s, 3 H).

### 77e: [(2R,3R,4R,5R,6R)-5-acetamido-3,4-diacetoxy-6-[2-[2-[2-[2-[2-[(2R,6R)-2-[[bis(4- methoxyphenyl)-phenyl-methoxy]methyl]-2-(hydroxymethyl)-6-(5-methyl-2,4-dioxo-pyrimidin-1-yl)morpholin-4-yl]ethoxy]ethoxy]ethoxy]ethoxy]ethoxy]tetrahydropyran-2-yl]methyl acetate

[1728] Following general procedure G, 1.10 g (860 μmol) of the TIPS-ether 76e were deprotected, yielding 437 mg (45.3%) of the title compound 77e after silicagel chromatography (0 to 5% MeOH in DCM).

[1729] LCMS-Method A:

[1730] UV-wavelength [nm]=220: Rₜ[min]=1.72

[1731] Ionization method: ES⁻: [M−H]⁻=1121.6

[1732] 1H-NMR (DMSO-d6, 400 MHz) δ[ppm]: 11.36 (s, 1 H), 7.77 (d, J=9.17 Hz, 1 H), 7.53-7.56 (m, 1 H), 7.40 (d, J=7.34 Hz, 2 H), 7.19-7.31 (m, 7 H), 6.87 (d, J=8.93 Hz, 4 H), 5.85 (dd, J=9.66, 2.93 Hz, 1 H), 5.21 (d, J=3.42 Hz, 1 H), 4.97 (dd, J=11.25, 3.42 Hz, 1 H), 4.53-4.62 (m, 2 H), 4.03 (s, 3 H), 3.83-3.93 (m, 1 H), 3.72-3.82 (m, 8 H), 3.44-3.66 (m, 18 H), 2.98-3.04 (m, 2 H), 2.92 (br d, J=8.80 Hz, 1 H), 2.77-2.86 (m, 1 H), 2.52-2.57 (m, 2 H), 2.25-2.32 (m, 1 H), 2.18 (br t, J=10.51 Hz, 1 H), 2.10 (m, 3 H), 1.99 (m, 3 H), 1.89 (s, 3 H), 1.77 (s, 3 H), 1.67 (s, 3 H).

### 77f: [(2R,3R,4R,5R,6R)-5-acetamido-3,4-diacetoxy-6-[5-[(2R,6R)-2-[[bis(4-methoxyphenyl)-phenyl-methoxy]methyl]-2-(hydroxymethyl)-6-(5-methyl-2,4-dioxo-pyrimidin-1-yl)morpholin-4-yl]pentoxy]tetrahydropyran-2-yl]methyl acetate

[1733] Following general procedure G, 2.15 g (1.88 mmol) of the TIPS-ether 76f were deprotected, yielding 1.21 g (65.0%) of the title compound 77f after silicagel chroma-tography (0 to 5% MeOH in DCM).

[1734] LCMS-Method A:

[1735] UV-wavelength [nm]=220: Rₜ[min]=1.69

[1736] Ionization method: ES⁺: [M+H]⁺=989.5

[1737] 1H-NMR (DMSO-d6, 400 MHz) δ[ppm]: 11.36 (s, 1 H), 7.79 (d, J=9.29 Hz, 1 H), 7.51-7.58 (m, 1 H), 7.40 (d, J=7.34 Hz, 2 H), 7.19-7.32 (m, 7 H), 6.87 (d, J=8.44 Hz, 4 H), 5.84 (dd, J=9.90, 2.93 Hz, 1 H), 5.21 (d, J=3.42 Hz, 1 H), 4.96 (dd, J=11.25, 3.42 Hz, 1 H), 4.58-4.65 (m, 1 H), 4.48 (d, J=8.44 Hz, 1 H), 3.98-4.06 (m, 3 H), 3.80-3.94 (m, 1 H), 3.63-3.78 (m, 9 H), 3.34-3.45 (m, 1 H), 2.97-3.08 (m, 2 H), 2.87 (br d, J=9.05 Hz, 1 H), 2.74 (br d, J=11.49 Hz, 1 H), 2.24-2.33 (m, 2 H), 2.01-2.17 (m, 5 H), 1.98 (s, 3 H), 1.89 (s, 3 H), 1.76 (s, 3 H), 1.67 (s, 3 H), 1.35-1.54 (m, 4 H), 1.23-1.35 (m, 2 H).

### 77g: [(2R,3R,4R,5R,6R)-5-acetamido-3,4-diacetoxy-6-[12-[(2R,6R)-2-[[bis(4-methoxy-phenyl)-phenyl-methoxy]methyl]-2-(hydroxymethyl)-6-(5-methyl-2,4-dioxo-pyrimidin-1-yl)morpholin-4-yl]dodecoxy]tetrahydropyran-2-yl]methyl acetate

[1738] Following general procedure G, 4.83 g (3.88 mmol) of the TIPS-ether 76g were deprotected, yielding 3.03 g (71.7%) of the title compound 77g without additonal purification.

[1739] LCMS-Method A:

[1740] UV-wavelength [nm]=220: Rₜ[min]=1.89

[1741] Ionization method: ES⁻: [M−H]⁻=1085.5

[1742] 1H-NMR (DMSO-d6, 400 MHz) δ[ppm]: 11.36 (s, 1 H), 7.79 (d, J=9.29 Hz, 1 H), 7.54 (s, 1 H), 7.40 (d, J=7.46 Hz, 2 H), 7.19-7.32 (m, 7 H), 6.87 (d, J=8.80 Hz, 4 H), 5.84 (dd, J=9.72, 2.87 Hz, 1 H), 5.21 (d, J=3.30 Hz, 1 H), 4.96 (dd, J=11.25, 3.30 Hz, 1 H), 4.61 (t, J=5.14 Hz, 1 H), 4.48 (d, J=8.44 Hz, 1 H), 3.98-4.07 (m, 3 H), 3.82-3.91 (m, 1 H), 3.61-3.78 (m, 9 H), 3.35-3.44 (m, 1 H), 2.96-3.08 (m, 2 H), 2.86 (br d, J=9.17 Hz, 1 H), 2.66-2.77 (m, 1 H), 2.30 (br t, J=7.09 Hz, 2 H), 2.01-2.16 (m, 5 H), 1.99 (s, 3 H), 1.89 (m, 3 H), 1.76 (m, 3 H), 1.67 (m, 3 H), 1.36-1.48 (m, 4 H), 1.20-1.31 (br s, 16 H).

[1743] General procedure H for the syntheses of compounds 78a-g and 84a-e

[1744] 1.0 eq. of the starting alcohols 77a-g (83a-e, see Scheme 20) and 6.0 eq. diisopropyl-ammonium tetrazolide were dissolved dry DCM (33 ml/1.0 mmol). Under an Ar-atmosphere, 3.0 eq. 2-cyanoethyl-N,N,N′,N′-tetraisopropyl phosphorodiamidite were added drop-wise at room temperature and the solution was stirred until complete conversion was achieved. The reaction was quenched with H₂O (25 ml) and the organic layer was separated. The aqueous phase was extracted with DCM and the combined organic extracts were dried with MgSO₄. After evaporation of the solvent, the crude product was dissolved in approx. 10 ml ethylacetate/diethylether (1:1) and 40 ml of n-pentane were added. The precipitate was centrifuged (2 minutes, 10° C., 4400 upm) and the liquid layer was decanted. The purification of the precipitate was repeated three times. After drying on a speedvac, the title compounds 78a-g (84a-e, see Scheme 22) were isolated as colourless solids.

### 78a: [(2R,3R,4R,5R,6R)-5-acetamido-3,4-diacetoxy-6-[2-[(2S,6R)-2-[[bis(4-methoxyphenyl)-phenyl-methoxy]methyl]-2-[[2-cyanoethoxy-(diisopropylamino)phosphanyl]oxymethyl]-6-(5-methyl-2,4-dioxo-pyrimidin-1-yl)morpholin-4-yl]ethoxy]tetrahydropyran-2-yl]methyl acetate

[1745] Following general procedure H, 401 mg (423 μmol) of the starting alcohol 77a were phosphitylated, yielding 430 mg (88.5%) of the title compound 78a.

[1746] 1H-NMR (DMSO-d6, 400 MHz) δ[ppm]: 11.35 (br s, 1 H), 7.78 (d, J=9.03 Hz, 1 H), 7.52, 7.55 (2×s, 1 H), 7.35-7.44 (m, 2 H), 7.19-7.32 (m, 7 H), 6.81-6.90 (m, 4 H), 5.86-5.92 (m, 1 H), 5.20 (m, 1 H), 4.95 (2×t, 3.12 Hz, 1 H), 4.50 (m, 1 H), 3.96-4.08 (m, 4 H), 3.77-3.93 (m, 3 H), 3.73 (s, 6 H), 3.38-3.67 (m, 5 H), 2.87-3.11 (m, 3 H), 2.72-2.83 (m, 1 H), 2.52-2.70 (m, 4 H), 2.13-2.36 (m, 2 H), 1.93-2.04 (m, 6 H), 1.85-1.91 (m, 3 H), 1.67-1.76 (m, 6 H), 0.94-1.13 (m, 12 H).

[1747] 31P-NMR (DMSO-d6, 162 MHz) δ[ppm]: 147.7, 147.5.

### 78b: [(2R,3R,4R,5R,6R)-5-acetamido-3,4-diacetoxy-6-[2-[2-[(2S,6R)-2-[[bis(4-methoxy-phenyl)-phenyl-methoxy]methyl]-2-[[2-cyanoethoxy-(diisopropylamino)phosphanyl]oxy-methyl]-6-(5-methyl-2,4-dioxo-pyrimidin-1-yl)morpholin-4-yl]ethoxy]ethoxy]tetrahydro-pyran-2-yl]methyl acetate

[1748] Following general procedure H, 527 mg (532 μmol) of the starting alcohol 77b were phosphitylated, yielding 528 mg (83.4%) of the title compound 78b.

[1749] 1H-NMR (DMSO-d6, 400 MHz) δ[ppm]: 11.35 (br s, 1 H), 7.79 (d, J=9.16, 1 H), 7.55 (2×s, 1 H), 7.35-7.43 (m, 2 H), 7.19-7.32 (m, 7 H), 6.82-6.90 (m, 4 H), 5.84-5.93 (m, 1 H), 5.21 (m, 1 H), 4.98 (m, 1 H), 4.54 (m, 1 H), 3.95-4.09 (m, 5 H), 3.71-3.92 (m, 3 H), 3.73 (s, 6 H), 3.39-3.64 (m, 9 H), 2.96-3.12 (m, 2 H), 2.77-2.96 (m, 2 H), 2.63-2.73 (m, 1 H), 2.52-2.63 (m, 2 H), 2.16-2.35 (m, 2 H), 2.09 (s, 3 H), 1.98, 1.99 (2×s, 3 H), 1.89 (s, 3 H), 1.76 (s, 3 H) 1.72, 1.69 (2×s, 3 H), 0.91-1.14 (m, 12 H).

[1750] 31P-NMR (DMSO-d6, 162 MHz) δ[ppm]: 147.6, 147.4.

### 78c: [(2R,3R,4R,5R,6R)-5-acetamido-3,4-diacetoxy-6-[2-[2-[2-[(2S,6R)-2-[[bis(4-methoxy-phenyl)-phenyl-methoxy]methyl]-2-[[2-cyanoethoxy-(diisopropylamino)-phosphanyl]oxymethyl]-6-(5-methyl-2,4-dioxo-pyrimidin-1-yl)morpholin-4-yl]ethoxy]-ethoxy]ethoxy]tetrahydropyran-2-yl]methyl acetate

[1751] Following general procedure H, 630 mg (609 μmol) of the starting alcohol 77c were phosphitylated, yielding 698 mg (92.8%) of the title compound 78c.

[1752] 1H-NMR (DMSO-d6, 400 MHz) δ[ppm]: 11.35 (br s, 1 H), 7.76 (m, 1 H), 7.56, 7.53 (2×s, 1 H), 7.39 (m, 2 H), 7.19-7.33 (m, 7 H), 6.82-6.91 (m, 4 H), 5.84-5.93 (m, 1 H), 5.21 (m, 1 H), 4.97 (m, 1 H), 4.55 (m, 1 H), 3.96-4.09 (m, 4 H), 3.70-3.91 (m, 4 H), 3.73 (s, 6 H), 3.40-3.63 (m, 13 H), 2.98-3.08 (m, 2 H), 2.79-2.96 (m, 2 H), 2.64-2.73 (m, 1 H), 2.52-2.62 (m, 2 H), 2.17-2.34 (m, 2 H), 2.10 (s, 3 H), 1.99 (m, 3 H), 1.89 (m, 3 H), 1.78 (m, 3 H), 1.72, 1.70 (2×s, 3 H), 0.91-1.25 (m, 12 H).

[1753] 31P-NMR (DMSO-d6, 162 MHz) δ[ppm]: 147.6, 147.4.

### 78d: [(2R,3R,4R,5R,6R)-5-acetamido-3,4-diacetoxy-6-[2-[2-[2-[2-[(2S,6R)-2-[[bis(4-meth-oxyphenyl)-phenyl- methoxy]methyl]-2-[[2-cyanoethoxy-(diisopropylamino)-phosphanyl]-oxymethyl]-6-(5-methyl-2,4-dioxo-pyrimidin-1-yl)morpholin-4-yl]ethoxy]-ethoxy]ethoxy]-ethoxy]tetrahydropyran-2-yl]methyl acetate

[1754] Following general procedure H, 450 mg (417 μmol) of the starting alcohol 77d were phosphitylated, yielding 460 mg (86.2%) of the title compound 78d.

[1755] 1H-NMR (DMSO-d6, 400 MHz) δ[ppm]: (br s, 1 H), 7.77 (d, J=9.22 Hz, 1 H), 7.56, 7.53 (2×s, 1 H), 7.35-7.43 (m, 2 H), 7.19-7.33 (m, 7 H), 6.82-6.90 (m, 4 H), 5.84-5.93 (m, 1 H), 5.22 (m, 1 H), 4.97 (m, 1 H), 4.56 (m, 1 H), 3.97-4.09 (m, 4 H), 3.68-3.96 (m, 4 H), 3.73 (s, 6 H), 3.37-3.66 (m, 17 H), 2.79-3.08 (m, 4 H), 2.64-2.71 (m, 1 H), 2.52-2.62 (m, 2 H), 2.17-2.35 (m, 2 H), 2.10 (s, 3 H), 1.99 (s, 3 H), 1.89 (s, 3 H), 1.77 (s, 3 H), 1.72, 1.69 (2×s, 3 H), 0.89-1.22 (m, 12 H).

[1756] 31P-NMR (DMSO-d6, 162 MHz) δ[ppm]: 147.6, 147.4.

### 78e: [(2R,3R,4R,5R,6R)-5-acetamido-3,4-diacetoxy-6-[2-[2-[2-[2-[2-[(2S,6R)-2-[[bis(4- methoxyphenyl)-phenyl-methoxy]methyl]-2-[[2-cyanoethoxy-(diisopropylamino)-phosphanyl]oxymethyl]-6-(5-methyl-2,4-dioxo-pyrimidin-1-yl)morpholin-4-yl]ethoxy]-ethoxy]ethoxy]ethoxy]ethoxy]tetrahydropyran-2-yl]methyl acetate

[1757] Following general procedure H, 495 mg (441 μmol) of the starting alcohol 77e were phosphitylated, yielding 589 mg (quant.) of the title compound 78e.

[1758] 1H-NMR (DMSO-d6, 400 MHz) δ[ppm]: 11.35 (br s, 1 H), 7.77 (d, J=9.16 Hz, 1 H), 7.56, 7.53 (2×s, 1 H), 7.35-7.43 (m, 2 H), 7.18-7.33 (m, 7 H), 6.86 (br d, J=8.78 Hz, 4 H), 5.84-5.93 (m, 1 H), 5.22 (dm, 1 H), 4.97 (m, 1 H), 4.56 (m, 1 H), 3.96-4.10 (m, 4 H), 3.72-3.95 (m, 4 H), 3.73 (s, 6 H), 3.41-3.63 (m, 21 H), 2.79-3.08 (m, 4 H), 2.64-2.72 (m, 1 H), 2.53-2.61 (m, 2 H), 2.14-2.33 (m, 2 H), 2.10 (s, 3 H), 1.99 (s, 3 H), 1.89 (s, 3 H), 1.77 (s, 3 H), 1.72, 1.69 (2×s, 3 H), 0.93-1.12 (m, 12 H).

[1759] 31P-NMR (DMSO-d6, 162 MHz) δ[ppm]: 147.6, 147.4.

### 78f: [(2R,3R,4R,5R,6R)-5-acetamido-3,4-diacetoxy-6-[5-[(2S,6R)-2-[[bis(4-methoxyphenyl)-phenyl-methoxy]methyl]-2-[[2-cyanoethoxy-(diisopropylamino)phosphanyl]oxymethyl]-6-(5-methyl-2,4-dioxo-pyrimidin-1-yl)morpholin-4-yl]pentoxy]tetrahydropyran-2-yl]methyl acetate

[1760] Following general procedure H, 1.17 g (1.18 mmol) of the starting alcohol 77f were phosphitylated, yielding 1.32 g (94.1%) of the title compound 78f.

[1761] 1H-NMR (DMSO-d6, 400 MHz) δ[ppm]: 11.36 (br s, 1 H), 7.78 (2×d, J=9.19, 1 H), 7.57, 7.54 (2×s, 1 H), 7.36-7.44 (m, 2 H), 7.19-7.32 (m, 7 H), 6.86 (br d, J=8.78 Hz, 4 H), 5.89 (m, 1 H), 5.21 (m, 1 H), 4.96 (m, 1 H), 4.48 (m, 1 H), 3.94-4.09 (m, 4 H), 3.81-3.93 (m, 2 H), 3.66-3.75 (m, 1 H), 3.73 (s, 6 H), 3.53-3.66 (m, 2 H), 3.37-3.51 (m, 3 H), 3.07-3.13 (m, 1 H), 2.95-3.05 (m, 1 H), 2.84-2.92 (m, 1 H), 2.77 (m, 1 H), 2.63-2.71 (m, 1 H), 2.52-2.62 (m, 1 H), 2.23-2.39 (m, 2 H), 2.02-2.16 (m, 2 H), 2.10 (s, 3 H), 1.99, 1.98 (2×s, 3 H), 1.89 (s, 3 H), 1.76 (s, 3 H), 1.73, 1.70 (2×s, 3 H), 1.35-1.56 (m, 4 H), 1.22-1.33 (m, 2 H), 0.93-1.13 (m, 12 H).

[1762] 31P-NMR (DMSO-d6, 162 MHz) δ[ppm]: 147.4, 147.1.

### 78g: [(2R,3R,4R,5R,6R)-5-acetamido-3,4-diacetoxy-6-[12-[(2S,6R)-2-[[bis(4-methoxy-phenyl)-phenyl-methoxy]methyl]-2-[[2-cyanoethoxy-(diisopropylamino)phosphanyl]oxy-methyl]-6-(5-methyl-2,4-dioxo-pyrimidin-1-yl)morpholin-4-yl]dodecoxy]tetrahydropyran-2-yl]methyl acetate

[1763] Following general procedure H, 1.52 g (1.40 mmol) of the starting alcohol 77g were phosphitylated, yielding 1.55 g (86.3%) of the title compound 78g.

[1764] 1H-NMR (DMSO-d6, 400 MHz) δ[ppm]: 11.37 (br s, 1 H), 7.80 (d, J=9.22 Hz, 1 H), 7.57, 7.54 (2×s, 1 H), 7.36-7.45 (m, 2 H), 7.20-7.32 (m, 7 H), 6.86 (d, J=8.85 Hz, 4 H), 5.86-5.93 (m, 1 H), 5.22 (m, 1 H), 4.97 (m, 1 H), 4.49 (m, 1 H), 3.82-4.09 (m, 6 H), 3.74 (s, 6 H), 3.65-3.72 (m, 1 H), 3.54-3.64 (m, 2 H), 3.36-3.52 (m, 3 H), 3.06-3.14 (m, 1 H), 2.96-3.06 (m, 1 H), 2.73-2.91 (m, 2 H), 2.64-2.71 (m, 1 H), 2.53-2.61 (m, 1 H), 2.20-2.39 (m, 2 H), 2.03-2.16 (m, 2 H), 2.11 (s, 3 H), 1.99 (s, 3 H), 1.90 (s, 3 H),1.77 (s, 3 H), 1.73, 1.71 (2×s, 3 H), 1.35-1.52 (m, 4 H), 1.17-1.32 (m, 16 H), 0.97-1.14 (m, 12 H).

[1765] 31P-NMR (DMSO-d6, 162 MHz) δ[ppm]: 147.3, 147.1.

[chemical structure]

[chemical structure]

[chemical structure]

### 80a: Benzyl 2-[(2R,3R,4R,5R,6R)-3-acetamido-4,5-diacetoxy-6-(acetoxymethyl)tetrahydro-pyran-2-yl]oxyacetate

[1766] To a mixture of starting compound 70 (16 g, 41.1 mmol) and benzyl 2-hydroxy-acetate 79a (13.6 g, 82.2 mmol) in 160 ml DCE was added Sc(OTf)₃ (1.41 g, 2.88 mmol). The solution was stirred at 90° C. for 16 h to achieve complete conversion. The reaction mixture was poured into 200 ml sat. NaHCO₃ and extracted with 3×100 ml DCM. The combined organic phases were dried over anhydrous Na₂SO₄, filtered and the filtrate was concentrated in vacuo. The residue was purified by column chromatography (PE:EtOAc 1:1) and then reverse flash chromatography (neutral), yielding 12.0 g (60%) of the title compound 80a as yellow oil.

[1767] MS [M+H]+(m/z)=496.0

### 81a: 2-[(2R,3R,4R,5R,6R)-3-acetamido-4,5-diacetoxy-6-(acetoxymethyl)tetrahydropyran-2-yl]oxyacetic acid

[1768] To the mixture of compound 80a (12 g, 24.2 mmol) in 150 ml EtOAc was added Pd/C (3 g, 10% on carbon and 50% of water content) at 25° C. The mixture was stirred at room temperature for 12 h under H₂-atmosphere (15 psi) until complete conversion was achieved. The mixture was filtered and the filtrate was concentrated in vacuo to give 81a (9.2 g, 93%) as colourless foam.

[1769] 1H-NMR (DMSO-d6, 400 MHz) δ[ppm]: 7.93 (br d, J=8.7 Hz, 1 H), 5.22 (d, J=3.4 Hz, 1 H), 5.01 (dd, J=3.3, 11.1 Hz, 1 H), 4.63 (d, J=8.5 Hz, 1 H), 4.10 (br d, J=4.9 Hz, 2 H), 4.05-3.99 (m, 3 H), 3.94-3.85 (m, 2 H), 2.14-2.10 (m, 3 H), 2.02-1.99 (m, 3 H), 1.89 (s, 3 H), 1.79 (s, 3 H).

### 80c: Benzyl 2-[2-[2-[(2R,3R,4R,5R,6R)-3-acetamido-4,5-diacetoxy-6-(acetoxymethyl)tetra-hydropyran-2-yl]oxyethoxy]ethoxy]acetate

[1770] Following the protocol described for compound 80a, 14.6 g (37.6 mmol) of 70 and 19.1 g (75.2 mmol) benzyl 2-[2-(2-hydroxyethoxy)ethoxy]acetate 79c gave 12.0 g (54.8%) of the title compound 80c as light yellow oil.

[1771] 1H-NMR (DMSO-d6, 400 MHz) δ[ppm]: 7.75 (d, J=9.17 Hz, 1 H), 7.50-7.27 (m, 5 H), 5.21 (d, J=3.30 Hz, 1 H,) 5.15 (s, 2 H), 4.97 (dd, J=11.19, 3.36 Hz, 1 H), 4.57 (d, J=8.44 Hz, 1 H), 4.19 (s, 2 H), 4.04-4.00 (m, 3 H), 3.88 (dt, J=10.97, 8.94 Hz, 1 H), 3.81-3.71 (m, 1 H), 3.63-3.48 (m, 7 H), 2.10 (s, 3 H), 1.99 (s, 3 H), 1.89 (s, 3 H), 1.77 (s, 3 H).

### 81c: 2-[2-[2-[(2R,3R,4R,5R,6R)-3-acetamido-4,5-diacetoxy-6-(acetoxymethyl)tetrahydro-pyran-2-yl]oxyethoxy]ethoxy]acetic acid

[1772] To a solution of benzylester 80c (12.0 g, 20.6 mmol) in 400 ml EtOAc was added Pd/C (2 g, 10% on carbon and 50% of water content). The mixture was stirred at room temperature under H₂-atmosphere (15 psi) for 12 h. The reaction mixture was filtered and the filtrate was concentrated in vacuo to give 8.5 g (83.7%) 81c as a colorless oil.

[1773] 1H-NMR (DMSO-d6, 400 MHz) δ[ppm]: 7.78 (d, J=9.17 Hz, 1 H), 5.22 (d, J=3.42 Hz, 1 H), 4.98 (dd, J=11.13, 3.42 Hz, 1 H), 4.59 (d, J=8.44 Hz, 1 H), 4.10-3.98 (m, 5 H), 3.89 (dt, J=11.00, 8.93 Hz, 1 H), 3.78 (dt, J=11.16, 4.63 Hz, 1 H), 3.65-3.46 (m, 7 H), 2.11 (s, 3 H), 2.01 (s, 3 H), 1.90 (s, 3 H), 1.78 (s, 3 H).

### 80b: Benzyl 2-[2-[(2R,3R,4R,5R,6R)-3-acetamido-4,5-diacetoxy-6-(acetoxymethyl)tetra-hydro-pyran-2-yl]oxyethoxy]acetate

[1774] To the mixture of compound 79b (7.0 g, 21.2 mmol) and oxazoline 71 (6.7 g, 31.9 mmol) in 100 ml DCE was added 4 Å sieves (10 g) at 25° C. The mixture was stirred for 1.5 h, followed by the addition of TMSOTf (2.3 g, 10.6 mmol). After stirring for 12 h at room temperature, the reaction solution was poured into 200 ml sat. NaHCO₃-solution and extracted with 3×100 ml DCM. The combined organic phases were dried over anhydrous Na₂SO₄, filtered and concentrated in vacuo. The residue was purified by reverse flash chromatography to give compound 80b (4.0 g, 36%) as yellow oil.

[1775] 1H-NMR (DMSO-d6, 400 MHz) δ[ppm]: 7.68 (d, J=9.2 Hz, 1 H), 7.29-7.16 (m, 5 H), 5.12-5.05 (m, 1 H), 5.02 (s, 2 H), 4.89-4.79 (m, 1 H), 4.43 (d, J=8.4 Hz, 1 H), 4.06 (d, J=1.6 Hz, 2 H), 3.92-3.85 (m, 3 H), 3.81-3.64 (m, 2 H), 3.55-3.41 (m, 3 H), 1.97 (s, 3 H), 1.87-1.84 (m, 3 H), 1.78-1.74 (m, 3 H), 1.65-1.57 (m, 3 H).

### 81b: 2-[2-[(2R,3R,4R,5R,6R)-3-acetamido-4,5-diacetoxy-6-(acetoxymethyl)tetrahydropyran-2-yl]oxyethoxy]acetic acid

[1776] To the mixture of compound 80b (6.0 g, 11.1 mmol) in 100 ml EtOAc was added Pd/C (0.6 g, 10% on carbon and 50% of water content) at room temperature. The mixture was stirred at for 12 h under H₂ (15 psi) to achieve complete conversion. The reaction mixture was filtered and the filtrate was concentrated in vacuo to give 5.0 g (96%) of the title compound 81b as white foam.

[1777] 1H-NMR (DMSO-d6, 400 MHz) δ[ppm]: 7.83 (d, J=9.3 Hz, 1 H), 5.22 (d, J=3.4 Hz, 1 H), 4.97 (dd, J=3.4, 11.2 Hz, 1 H), 4.57 (d, J=8.6 Hz, 1 H), 4.06-4.02 (m, 3 H), 4.01 (s, 2 H), 3.89 (td, J=8.9, 11.1 Hz, 1 H), 3.83-3.77 (m, 1 H), 3.66-3.52 (m, 3 H), 2.13-2.07 (m, 3 H), 2.02-1.98 (m, 3 H), 1.89 (s, 3 H), 1.78 (s, 3 H).

### 80d: Benzyl 5-[(2R,3R,4R,5R,6R)-3-acetamido-4,5-diacetoxy-6-(acetoxymethyl)tetrahydro-pyran-2-yl]oxypentanoate

[1778] To a solution of (D)-2-desoxy-2-amino-galactosyl-pentaacetate 70 (387 g, 0.968 mol) in 4 l DCE, was added TMSOTf (322 g, 1.452 mol) dropwise at 15° C. The mixture was heated at 50° C. for 1.5 h and then stirred at 30° C. overnight. The reaction mixture was poured into 4 l sat. NaHCO₃-solution and extracted twice with 1 l DCM. The combined organic layers were dried over anhydrous Na₂SO₄, filtered and concentrated in vacuo. The residue was dissolved in 4 l DCE, benzyl-5-hydroxypentanoate 79d (302 g, 1.452 mol) and 300 g powdered molecular sieves (4 Å) were added at 15° C. After stirring for 1 h, TMSOTf (107.4 g, 0.484 mol) was added dropwise at 15° C. The suspension was stirred at 15° C. overnight, to achieve complete conversion. The reaction mixture was poured into 4 l sat. NaHCO₃-solution, filtered and extracted twice with 1 l DCM. The combined organic layers were dried over Na₂SO₄, filtered and concentrated in vacuo. The residue was purified by column chromatography (PE/EtOAc 3:1) to give the desired product (240 g, 46%) 80d as colorless oil.

[1779] 1H-NMR (CDCl₃, 400 MHz) δ[ppm]: 7.47-7.30 (m, 5 H), 5.74 (br d, J=8.5 Hz, 1 H), 5.36 (d, J=2.8 Hz, 1 H), 5.30-5.23 (m, 1 H), 5.17-5.07 (m, 2 H), 4.65 (d, J=8.4 Hz, 1 H), 4.20-4.08 (m, 3 H), 4.02-3.94 (m, 1 H), 3.94-3.85 (m, 2 H), 3.50 (td, J=6.1, 9.9 Hz, 1 H), 2.49-2.32 (m, 2 H), 2.15 (s, 3 H), 2.05 (s, 3 H), 2.01 (s, 3 H), 1.92 (s, 3 H), 1.78-1.56 (m, 4 H).

### 81d: 5-[(2R,3R,4R,5R,6R)-3-acetamido-4,5-diacetoxy-6-(acetoxymethyl)tetrahydropyran-2-yl]oxypentanoic acid

[1780] To a solution of benzylester 80d (240 g, 0.447 mol) in 2.5 l MeOH was added Pd/C (24 g, 10% on carbon, 50% water content). The mixture was stirred at 15° C. under H₂ (15 psi) overnight. The reaction mixture was filtered and the filtrate was concentrated in vacuo, yielding 196 g (97%) of 81d as white solid.

[1781] 1H-NMR (CDCl₃, 400 MHz) δ[ppm]: 6.19 (d, J=8.8 Hz, 1 H), 5.37 (d, J=3.1 Hz, 1 H), 5.30 (dd, J=3.4, 11.2 Hz, 1 H), 4.69 (d, J=8.3 Hz, 1 H), 4.16 (m, 1 H), 3.98-3.92 (m, 2 H), 3.57-3.48 (m, 2 H), 2.40-2.30 (m, 2 H), 2.18-2.15 (s, 3 H), 2.06 (s, 3 H), 2.02 (s, 3 H), 1.99-1.94 (s, 3 H), 1.76-1.59 (m, 4 H).

### 79e: Benzyl 12-hydroxydodecanoate

[1782] 5.0 g (22.4 mmol) 12-hydroxydodecanoic acid were dissolved in 100 ml DMF. After adding 4.5 g (3.15 ml, 25.8 mmol) benzylbromide and 3.37 g (33.6 mmol) potassium bicarbonate, the mixture was stirred for 20 h. The solvent was removed in vacuo and the residue was dissolved in diethyl ether. After washing with H₂O, the aqueous phase was separated and extracted with diethyl ether. The combined organic layers were dried with MgSO₄ and purified by silicagel chromatography (0 to 30% EtOAc in n-heptane), yielding 5.70 g (82.9%) of the desired benylester 79e.

[1783] LCMS-Method A:

[1784] UV-wavelength [nm]=220: Rₜ[min]=2.04

[1785] Ionization method: ES⁺: [M+H]⁺=307.2

### 80e: Benzyl 12-[(2R,3R,4R,5R,6R)-3-acetamido-4,5-diacetoxy-6-(acetoxymethyl)tetrahydro-pyran-2-yl]oxydodecanoate

[1786] Starting with 2.20 g (5.7 mmol) 70, 2.0 g (55.9%) of the title compound 80e were synthesized, following the protocol described for 80d. Complete glycosylation with 79e was achieved after stirring for 4 h at 70° C. and additional 16 h at room temperature. Final purification was done on silicagel, eluting with 0 to 100% EtOAc/DCM (1:1) in n-heptane.

[1787] LCMS-Method A:

[1788] UV-wavelength [nm]=220: Rₜ[min]=1.99

[1789] Ionization method: ES⁺: [M+H]⁺=636.5

### 81e: 12-[(2R,3R,4R,5R,6R)-3-acetamido-4,5-diacetoxy-6-(acetoxymethyl)tetrahydropyran-2-yl]oxydodecanoic acid

[1790] 2.0 g (3.2 mmol) of benzylester 80e were dissolved in 20 ml THF. After adding 167 mg (157 μmol) of Pd (10% on carbon), the reaction mixture was purged with H₂ and hydrogenated at an H₂-pressure of 4 bar. After 4 h, the Pd-catalyst was filtered off and the filtrate was evaporated in vacuo. The crude product was purified by silicagel chromatography (0 to 20% MeOH in DCM, 10% AcOH), which gave 1.67 g (97.3%) of carboxylic acid 81e.

[1791] LCMS-Method A:

[1792] ELSD: Rₜ[min]=1.68

[1793] Ionization method: ES⁺: [M+H]⁺=546.4

[1794] 1H-NMR (DMSO-d6, 400 MHz) δ[ppm]: 11.79 (br s, 1 H), 7.67 (d, J=9.17 Hz, 1 H), 5.08 (d, J=3.42 Hz, 1 H), 4.83 (dd, J=11.25, 3.42 Hz, 1 H), 4.35 (d, J=8.44 Hz, 1 H), 3.84-3.95 (m, 3 H), 3.73 (m, 1 H), 3.56 (m, 1 H), 3.44-3.51 (m, 1 H), 3.28 (m, 1 H), 1.97 (s, 3 H), 1.87 (s, 3 H), 1.76 (s, 3 H), 1.63 (s, 3 H), 1.28-1.39 (m, 4 H), 1.11 (s, 14 H).

[chemical structure]

[1795] General procedure J for the syntheses of compounds 82a to 82e

[1796] The carboxylic acid (81a-e, 1.0 to 1.2 eq.) and of the morpholine compound 24a (1.0 eq.) were dissolved in DCM (20 ml,/1.0 mmol). After adding 1.5 eq. HBTU and 3.0 eq. DIPEA, the reaction was stirred for 18 h at room temperature, to achieve complete conversion. The reaction solution was washed with sat. NaCHO₃- and sat. NaCl-solution. The organic layer was dried with MgSO₄ and the solvent was evaporated. Purification of the crude product on silica gave the desired amides as colourless solids.

### 82a: [(2R,3R,4R,5R,6R)-5-acetamido-3,4-diacetoxy-6-[2-[(2S,6R)-2-[[bis(4-methoxyphenyl)-phenyl-methoxy]methyl]-6-(5-methyl-2,4-dioxo-pyrimidin-1-yl)-2-(triisopropylsilyloxy-methyl)morpholin-4-yl]-2-oxo-ethoxy]tetrahydropyran-2-yl]methyl acetate

[1797] Following general procedure J, 400 mg (986 μmol, 1.2 eq.) of the carboxylic acid 81a gave 530 mg (57.7%) of the title compound 82a after purification on silica (0 to 10% DCM/EtOAc/MeOH 10:10:1 in DCM/EtOAc 1:1).

[1798] LCMS-Method C:

[1799] UV-wavelength [nm]=220: Rₜ[min]=3.15

[1800] Ionization method: ES⁻: [M−H]⁻=1115.9

### 82b: [(2R,3R,4R,5R,6R)-5-acetamido-3,4-diacetoxy-6-[2-[2-[(2S,6R)-2-[[bis(4-methoxy-phenyl)-phenyl-methoxy]methyl]-6-(5-methyl-2,4-dioxo-pyrimidin-1-yl)-2-(triisopropyl-silyloxymethyl)morpholin-4-yl]-2-oxo-ethoxy]ethoxy]tetrahydropyran-2-yl]methyl acetate

[1801] Following general procedure J, 406 mg (904 μmol, 1.1 eq.) of the carboxylic acid 81b gave 590 mg (61.8%) of the title compound 82b after purification on silica (0 to 10% DCM/EtOAc/MeOH 10:10:1 in DCM/EtOAc 1:1).

[1802] LCMS-Method C:

[1803] UV-wavelength [nm]=220: Rₜ[min]=3.16

[1804] Ionization method: ES⁻: [M−H]⁻=1160.0

### 82c: [(2R,3R,4R,5R,6R)-5-acetamido-3,4-diacetoxy-6-[2-[2-[2-[(2S,6R)-2-[[bis(4-methoxy-phenyl)-phenyl-methoxy]methyl]-6-(5-methyl-2,4-dioxo-pyrimidin-1-yl)-2-(triisopropylsilyl-oxymethyl)morpholin-4-yl]-2-oxo-ethoxy]ethoxy]ethoxy]tetrahydropyran-2-yl]methyl acetate

[1805] Following general procedure J, 406 mg (822 μmol, 1.2 eq.) of the carboxylic acid 81c gave 413 mg (50.0%) of the title compound 82c after purification on silica (0 to 10% DCM/EtOAc/MeOH 10:10:1 in DCM/EtOAc 1:1).

[1806] LCMS-Method C:

[1807] UV-wavelength [nm]=220: Rₜ[min]=3.17

[1808] Ionization method: ES⁻: [M−H]⁻=1204.0

### 82d: [(2R,3R,4R,5R,6R)-5-acetamido-3,4-diacetoxy-6-[5-[(2S,6R)-2-[[bis(4-methoxy-phenyl)-phenyl-methoxy]methyl]-6-(5-methyl-2,4-dioxo-pyrimidin-1-yl)-2-(triisopropylsilyloxy-methyl)morpholin-4-yl]-5-oxo-pentoxy]tetrahydropyran-2-yl]methyl acetate

[1809] Following general procedure J, 750 mg (1.68 mmol, 1.0 eq.) of the carboxylic acid 81d gave 1.76 g (90.6%) of the title compound 82d after purification on silica (0 to 5% MeOH in DCM).

[1810] LCMS-Method A:

[1811] UV-wavelength [nm]=220: Rₜ[min]=2.16

[1812] Ionization method: ES⁻: [M−H]⁻=1157.5

### 82e: [(2R,3R,4R,5R,6R)-5-acetamido-3,4-diacetoxy-6-[12-[(2S,6R)-2-[[bis(4-methoxy-phenyl)-phenyl-methoxy]methyl]-6-(5-methyl-2,4-dioxo-pyrimidin-1-yl)-2-(triisopropylsilyloxy-methyl)morpholin-4-yl]-12-oxo-dodecoxy]tetrahydropyran-2-yl]methyl acetate

[1813] Following general procedure J, 897 mg (1.64 mmol, 1.2 eq.) of the carboxylic acid 81e gave 1.46 g (84.5%) of the title compound 82e after purification on silica (0 to 5% MeOH in DCM).

[1814] LCMS-Method A:

[1815] UV-wavelength [nm]=220: Rₜ[min]=2.25

[1816] Ionization method: ES⁻: [M−H]⁻=1255.6

### 83a: [(2R,3R,4R,5R,6R)-5-acetamido-3,4-diacetoxy-6-[2-[(2R,6R)-2-[[bis(4-methoxyphenyl)-phenyl-methoxy]methyl]-2-(hydroxymethyl)-6-(5-methyl-2,4-dioxo-pyrimidin-1-yl)morpholin-4-yl]-2-oxo-ethoxy]tetrahydropyran-2-yl]methyl acetate

[1817] Following general procedure G (see scheme 18), 530 mg (474 μmol) of the TIPS-ether 82a were deprotected, yielding 380 mg (83.4%) of the title compound 83a after silicagel chromatography (0 to 10% DCM/EtOAc/MeOH 5:5:1 in DCM/EtOAc 1:1).

[1818] LCMS-Method C:

[1819] UV-wavelength [nm]=220: Rₜ[min]=2.29

[1820] Ionization method: ES⁻: [M−H]⁻=959.9

[1821] 1H-NMR (DMSO-d6, 600 MHz) □[ppm]: 11.44 (br s, 1 H), 7.83-7.88 (m, 0.4 H), 7.78 (br d,

[1822] J=9.17 Hz, 0.6 H), 7.64 (s, 1 H), 7.39-7.44 (m, 2 H), 7.21-7.32 (m, 7 H), 6.85-6.90 (m, 4 H), 5.88-5.93 (m, 0.4 H), 5.83 (m, 0.6 H), 5.19-5.23 (m, 1 H), 4.90-5.02 (m, 1.6 H), 4.53-4.62 (m, 1.4 H), 21 4.42 (br d, J=14.12 Hz, 0.6 H), 4.32-4.39 (m, 1 H), 4.20-4.31 (m, 1.4 H), 3.81-4.07 (m, 6 H), 3.72-3.79 (m, 7 H), 3.47-3.65 (m, 2 H), 2.99-3.11 (m, 2 H), 2.88-2.97 (m, 1 H), 2.10, 2.04 (2×s, 3 H), 1.99, 1.97 (2×s, 3 H), 1.88 (s, 3 H), 1.73, 1.72 (m, 6 H).

### 83b: [(2R,3R,4R,5R,6R)-5-acetamido-3,4-diacetoxy-6-[2-[2-[(2R,6R)-2-[[bis(4-methoxy-phenyl)-phenyl-methoxy]methyl]-2-(hydroxymethyl)-6-(5-methyl-2,4-dioxo-pyrimidin-1-yl)morpholin-4-yl]-2-oxo-ethoxy]ethoxy]tetrahydropyran-2-yl]methyl acetate

[1823] Following general procedure G (see scheme 18), 670 mg (577 μmol) of the TIPS-ether 82b were deprotected, yielding 504 mg (86.9%) of the title compound 83b after silicagel chromatography (0 to 10% DCM/EtOAc/MeOH 5:5:1 in DCM/EtOAc 1:1).

[1824] LCMS-Method C:

[1825] UV-wavelength [nm]=220: Rₜ[min]=2.30

[1826] Ionization method: ES⁻: [M−H]⁻=1003.9

[1827] 1H-NMR (DMSO-d6, 600 MHz) δ[ppm]: 11.42 (br s, 1 H), 7.80 (d, J=9.35 Hz, 1 H), 7.64, 7.60 (2×s, 1 H), 7.39-7.44 (m, 2 H), 7.19-7.35 (m, 7 H), 6.85-6.90 (m, 4 H), 5.87-5.93 (m, 0.4 H), 5.82 (br d, J=8.07 Hz, 0.6 H), 5.21 (br s, 1 H), 4.94-5.00 (m, 1.6 H), 4.64-4.70 (m, 0.4 H), 4.54-4.58 (m, 1 H), 4.33-4.39 (m, 0.6 H), 4.11-4.26 (m, 2.4 H), 4.00-4.05 (m, 3.4 H), 3.78-3.94 (m, 2.6 H), 3.74 (m, 6 H), 3.42-3.70 (m, 6 H), 3.07-3.11 (m, 1 H), 2.89-3.05 (m, 2 H), 2.04-2.12 (m, 3 H), 1.97-2.01 (m, 3 H), 1.89 (s, 3 H), 1.71-1.78 (m, 6 H).

### 83c: [(2R,3R,4R,5R,6R)-5-acetamido-3,4-diacetoxy-6-[2-[2-[2-[(2R,6R)-2-[[bis(4-methoxy-phenyl)-phenyl-methoxy]methyl]-2-(hydroxymethyl)-6-(5-methyl-2,4-dioxo-pyrimidin-1-yl)-morpholin-4-yl]-2-oxo-ethoxy]ethoxy]ethoxy]tetrahydropyran-2-yl]methyl acetate

[1828] Following general procedure G (see scheme 18), 410 mg (340 μmol) of the TIPS-ether 82c were deprotected, yielding 285 mg (79.9%) of the title compound 83c after silicagel chromatography (0 to 10% DCM/EtOAc/MeOH 5:5:1 in DCM/EtOAc 1:1).

[1829] LCMS-Method C:

[1830] UV-wavelength [nm]=220: Rₜ[min]=2.31

[1831] Ionization method: ES⁻: [M−H]⁻=1047.9

[1832] 1H-NMR (DMSO-d6, 600 MHz) δ[ppm]: 11.43 (br s, 1 H), 7.76 (m, 1 H), 7.57-7.65 (m, 1 H), 7.42 (m, 2 H), 7.21-7.32 (m, 7 H), 6.85-6.90 (m, 4 H), 5.88-5.94 (m, 0.4 H), 5.82 (m, 0.6 H), 5.21 (m, 1 H), 4.94-4.99 (m, 1.6 H), 4.63-4.69 (m, 0.4 H), 4.57 (m, 1 H), 4.36 (m, 0.6 H), 4.16-4.26 (m, 2 H), 4.09-4.15 (m, 0.4 H), 3.99-4.05 (m, 3 H), 3.85-3.92 (m, 2 H), 3.69-3.79 (m, 8 H), 3.45-3.62 (m, 9 H), 3.06-3.10 (m, 1 H), 2.88-3.06 (m, 2 H), 2.10 (s, 3 H), 1.99 (s, 3 H), 1.88 (s, 3 H), 1.76 (br s, 3 H), 1.73 (s, 3 H).

### 83d: [(2R,3R,4R,5R,6R)-5-acetamido-3,4-diacetoxy-6-[5-[(2R,6R)-2-[[bis(4-methoxyphenyl)-phenyl-methoxy]methyl]-2-(hydroxymethyl)-6-(5-methyl-2,4-dioxo -pyrimidin-1-yl)morpholin-4-yl]-5-oxo-pentoxy]tetrahydropyran-2-yl]methyl acetate

[1833] Following general procedure G (see scheme 18), 1.75 g (1.51 mmol) of the TIPS-ether 82d were deprotected, yielding 1.17 g (77.3%) of the title compound 83d after silicagel chromatography (0 to 10% MeOH in DCM).

[1834] LCMS-Method A:

[1835] UV-wavelength [nm]=220: Rₜ[min]=1.80

[1836] Ionization method: ES⁻: [M−H]⁻=1001.4

[1837] 1H-NMR (DMSO-d6, 400 MHz) δ[ppm]: 11.43 (s, 1 H), 7.78 (m, 1 H), 7.64, 7.58 (2×b s, 1 H), 7.41 (m, 2 H), 7.20-7.33 (m, 7 H), 6.88 (m, 4 H), 5.85 (m, 0.4 H), 5.77 (m, 0.6 H), 5.21 (m, 1 H), 4.92-5.01 (m, 1.6 H), 4.61-4.67 (m, 0.4 H), 4.45-4.52 (m, 1 H), 4.37-4.45 (m, 0.6 H), 4.21-4.29 (m, 0.4 H), 3.67-4.07 (m, 12 H), 3.32-3.64 (m, 4 H), 2.81-3.14 (m, 3 H), 2.27-2.38 (m, 2 H), 2.06-2.12 (m, 3 H), 1.96-2.01 (m, 3 H), 1.89 (m, 3 H), 1.76 (m, 3 H), 1.72 (m, 3 H), 1.49 (br s, 4 H).

### 83e: [(2R,3R,4R,5R,6R)-5-acetamido-3,4-diacetoxy-6-[12-[(2R,6R)-2-[[bis(4-methoxy-phen-yl)-phenyl-methoxy]methyl]-2-(hydroxymethyl)-6-(5-methyl-2,4-dioxo-pyrimidin-1-yl)-morpholin-4-yl]-12-oxo -dodecoxy]tetrahydropyran-2-yl]methyl acetate

[1838] Following general procedure G (see scheme 18), 1.45 g (1.15 mmol) of the TIPS-ether 82e were deprotected, yielding 1.10 g (86.6%) of the title compound 83e after silicagel chromatography (0 to 5% MeOH in DCM).

[1839] LCMS-Method A:

[1840] UV-wavelength [nm]=220: Rₜ[min]=1.96

[1841] Ionization method: ES⁻: [M−H]⁻=1099.6

[1842] 1H-NMR (DMSO-d6, 400 MHz) δ[ppm]: 11.42 (br s, 1 H), 7.79 (d, J=9.29 Hz, 1 H), 7.63, 7.57 (2×s, 1 H), 7.41 (m, 2 H), 7.20-7.34 (m, 7 H), 6.87 (m, 4 H), 5.84 (m, 0.4 H), 5.77 (m, 0.6 H), 5.21 (m, 1 H), 4.91-5.01 (m, 1.6 H), 4.61-4.68 (m, 0.4 H), 4.48 (m, 1 H), 4.39 (m, 0.6 H), 4.24 (m, 0.4 H), 3.98-4.06 (m, 3 H), 3.66-3.90 (m, 3 H), 3.74 (s, 6 H), 3.56 (m, 1 H), 3.36-3.50 (m, 2 H), 2.77-3.16 (m, 2 H), 2.22-2.39 (m, 2 H), 2.10 (m, 3 H), 1.99 (m, 3 H), 1.89 (m, 3 H), 1.76 (m, 3 H), 1.72 (m, 3 H), 1.39-1.56 (m, 4 H), 1.18-1.32 (br s, 16 H).

### 84a: [(2R,3R,4R,5R,6R)-5-acetamido-3,4-diacetoxy-6-[2-[(2S,6R)-2-[[bis(4-methoxyphenyl)-phenyl-methoxy]methyl]-2-[[2-cyanoethoxy-(diisopropylamino)phosphanyl]oxymethyl]-6-(5-methyl-2,4-dioxo-pyrimidin-1-yl)morpholin-4-yl]-2-oxo-ethoxy]tetrahydropyran-2-yl]methyl acetate

[1843] Following general procedure H (see Scheme 18), 380 mg (395 μmol) of the starting alcohol 83a gave 434 mg (94.4%) of the title compound 84a.

[1844] 1H-NMR (DMSO-d6, 400 MHz) δ[ppm]: 11.41 (b s, 1 H), 7.72-7.90 (m, 1 H), 7.60-7.71 (m, 1 H), 7.35-7.48 (m, 2 H), 7.17-7.33 (m, 7 H), 6.82-6.95 (m, 4 H), 5.78-6.05 (m, 1 H), 5.16-5.26 (m, 1 H), 4.91-5.03 (m, 1 H), 4.55-4.64 (m, 1 H), 4.10-4.54 (m, 3 H), 3.52-4.08 (m, 16 H), 3.36-3.50 (m, 2 H), 2.85-3.18 (m, 3 H), 2.57-2.72 (m, 2 H), 2.07 (m, 3 H), 1.98 (m, 3 H), 1.88 (m, 3 H), 1.68-1.78 (m, 6 H), 0.89-1.22 (m, 12 H).

[1845] 31P-NMR (DMSO-d6, 162 MHz) δ[ppm]: 148.2, 147.1, 146.8, 146.3.

### 84b: [(2R,3R,4R,5R,6R)-5-acetamido-3,4-diacetoxy-6-[2-[2-[(2S,6R)-2-[[bis(4-methoxy-phenyl)-phenyl-methoxy]methyl]-2-[[2-cyanoethoxy-(diisopropylamino)phosphanyl]oxy-methyl]-6-(5-methyl-2,4-dioxo-pyrimidin-1-yl)morpholin-4-yl]-2-oxo-ethoxy]ethoxy]tetra-hydropyran-2-yl]methyl acetate

[1846] Following general procedure H (see Scheme 18), 500 mg (497 μmol) of the starting alcohole 83b gave 575 mg (95.9%) of the title compound 84b.

[1847] 1H-NMR (DMSO-d6, 400 MHz) δ[ppm]: 11.40 (br s, 1 H), 7.79 (br d, J=9.22 Hz, 1 H), 7.63 (m, 1 H), 7.40 (br s, 2 H), 7.20-7.34 (m, 7 H), 6.83-6.91 (m, 4 H), 5.80-6.03 (m, 1 H), 5.22 (m, 1 H), 4.96 (m, 1 H), 4.56 (m, 1 H), 4.08-4.43 (m, 4 H), 4.03 (s, 3 H), 3.52-3.91 (m, 16 H), 3.38-3.50 (m, 2 H), 2.86-3.18 (m, 3 H), 2.52-2.75 (m, 2 H), 2.07 (m, 3 H), 1.99 (m, 3 H), 1.90 (m, 3 H), 1.68-1.81 (m, 6 H), 0.89-1.22 (m, 12 H).

[1848] 31P-NMR (DMSO-d6, 162 MHz) δ[ppm]: 148.2, 147.2, 147.13, 147.06.

### 84c: [(2R,3R,4R,5R,6R)-5-acetamido-3,4-diacetoxy-6-[2-[2-[2-[(2S,6R)-2-[[bis (4-methoxy-phenyl)-phenyl-methoxy]methyl]-2-[[2-cyanoethoxy-(diisopropylamino)phosphanyl]oxy-methyl]-6-(5-methyl-2,4-dioxo-pyrimidin-1-yl)morpholin-4-yl]-2-oxo-ethoxy]ethoxy]-ethoxy]tetrahydropyran-2-yl]methyl acetate

[1849] Following general procedure H (see Scheme 18), 285 mg (272 μmol) of the starting alcohol 83c gave 317 mg (93.5%) of the title compound 84c.

[1850] 1H-NMR (DMSO-d6, 400 MHz) δ[ppm]: 11.40 (br s, 1 H), 7.77 (m, 1 H), 7.60-7.71 (m, 1 H), 7.40 (m, 2 H), 7.21-7.33 (m, 7 H), 6.87 (m, 4 H), 5.82-5.99 (m, 1 H), 5.21 (m, 1 H), 4.97 (m, 1 H), 4.57 (m, 1 H), 4.09-4.39 (m, 3 H), 3.97-4.08 (m, 3 H), 3.34-3.95 (m, 20 H), 2.90-3.18 (m, 3 H), 2.56-2.73 (m, 2 H), 2.10 (m, 3 H), 2.07 (m, 3 H), 1.99 (m, 3 H), 1.89 (m, 3 H), 1.71-1.80 (m, 6 H), 0.89-1.22 (m, 12 H).

[1851] 31P-NMR (DMSO-d6, 162 MHz) δ[ppm]: 148.1, 147.3, 147.2, 147.0.

### 84d: [(2R,3R,4R,5R,6R)-5-acetamido-3,4-diacetoxy-6-[5-[(2S,6R)-2-[[bis(4-methoxyphenyl)-phenyl-methoxy]methyl]-2-[[2-cyanoethoxy-(diisopropylamino)phosphanyl]oxymethyl]-6-(5-methyl-2,4-dioxo-pyrimidin-1-yl)morpholin-4-yl]-5-oxo-pentoxy]tetrahydropyran-2-yl]methyl acetate

[1852] Following general procedure H (see Scheme 18), 1.0 g (997 μmol) of the starting alcohol 83d gave 1.19 g (99.2%) of the title compound 84d.

[1853] 1H-NMR (DMSO-d6, 400 MHz) δ[ppm]: 11.41 (br s, 1 H), 7.74-7.81 (m, 1 H), 7.58-7.70 (m, 1 H), 7.40 (m, 2 H), 7.20-7.33 (m, 7 H), 6.87 (m, 4 H), 5.79-5.93 (m, 1 H), 5.21 (br s, 1 H), 4.96 (m, 1 H), 4.31-4.52 (m, 2 H), 3.96-4.08 (m, 4 H), 3.53-3.94 (m, 6 H), 3.73 (s, 6 H), 3.34-3.50 (m, 4 H), 3.02-3.19 (m, 1 H), 2.83-3.01 (m, 1 H), 2.56-2.74 (m, 2 H), 2.52-2.54 (m, 1 H), 2.26-2.43 (m, 2 H), 2.10, 2.08 (2×s, 3 H), 1.99 (s, 3 H), 1.89 (m, 3 H), 1.71-1.79 (m, 6 H), 1.41-1.69 (m, 4 H), 0.89-1.12 (m, 12 H).

[1854] 31P-NMR (DMSO-d6, 162 MHz) δ[ppm]: 147.9, 147.1, 147.0, 146.7.

### 84e: [(2R,3R,4R,5R,6R)-5-acetamido-3,4-diacetoxy-6-[12-[(2S,6R)-2-[[bis(4-methoxy-phenyl)-phenyl-methoxy]methyl]-2-[[2-cyanoethoxy-(diisopropylamino)phosphanyl]oxy-methyl]-6-(5-methyl-2,4-dioxo-pyrimidin-1-yl)morpholin-4-yl]-12-oxo-dodecoxy]tetra-hydropyran-2-yl]methyl acetate

[1855] Following general procedure H (see Scheme 18), 557 mg (506 μmol) of the starting alcohol 83e gave 396 mg (60.2%) of the title compound 84e.

[1856] 1H-NMR (DMSO-d6, 400 MHz) δ[ppm]: 11.35-11.48 (m, 1 H), 7.76-7.84 (m, 1 H), 7.56-7.70 (m, 1 H), 7.33-7.45 (m, 2 H), 7.21-7.33 (m, 7 H), 6.87 (m, 4 H), 5.77-5.96 (m, 1 H), 5.21 (m, 1 H), 4.93-5.01 (m, 1 H), 4.31-4.51 (m, 2 H), 3.94-4.11 (m, 4 H), 3.53-3.92 (m, 4 H), 3.73 (m, 6 H), 3.33-3.49 (m, 3 H), 3.03-3.21 (m, 2 H), 2.83-2.99 (m, 1 H), 2.62-2.72 (m, 1 H), 2.21-2.48 (m, 2 H), 2.10 (m, 3 H), 1.99 (m, 3 H), 1.89 (m, 3 H), 1.71-1.82 (m, 6 H), 1.45 (br s, 4 H), 1.14-1.30 (m, 18 H), 0.83-1.13 (m, 12 H).

[1857] 31P-NMR (DMSO-d6, 162 MHz) δ[ppm]: 147.7, 147.3, 147.2, 146.7.

[1858] The chemical structures of some examples of compounds according to the present specification are illustrated in the following tables; correspondence with the specification and the schemes is indicated, as well as stereochemistry. Table A and B show some examples of non-targeting phosphoramidite nucleotide analogs from the morpholino- and dioxane-series for oligonucleotide synthesis; Table C shows some examples of targeting nucleotide analogs for oligonucleotide synthesis.

[1859] The phosphoramidites as nucleotide precursors are abbreviated with a “pre-l”, the nucleotide analogs are abreviated with an “l”, followed by the nucleobase and a number, which specifies the group Y in formulas (I) and (II) (see Tables A and B). To distinguish both stereochemistries, the (2S,6R)-diastereoisomers are indicated with an additional “a”, the analogues (2R,6R)-diastereomers are indicated with an additional “b”. Targeted nucleotide precursors and targeted nucleotide analogs (Table C) are abbreviated as described above, but with an “lg” instead of the “l”. For the targeted analogs, there is no additional differentiation between stereoisomers.

[1860] Compound Tables

TABLE A
Non-targeting nucleotide analogs of formula (I) within the morpholine series

| | | | | | Name in | |
|---|---|---|---|---|---|---|
| | | Text | Synthetic | | oligonucleotide | Stereo- |
| N^{o} | Structure | number | scheme | Name | sequence | chemistry |
| 1 | [chemical structure] | 16a | 5 | pre-lT3a | lT3a | (2S,6R) |
| 2 | [chemical structure] | 16b | 5 | pre-lU3a | lU3a | (2S,6R) |
| 3 | [chemical structure] | 16c | 5 | pre-lG3a | lG3a | (2S,6R) |
| 4 | [chemical structure] | 16e | 5 | pre-lA3a | lA3a | (2S,6R) |
| 5 | [chemical structure] | 16f | 5 | pre-lC3a | lC3a | (2S,6R) |
| 6 | [chemical structure] | 21a | 6 | pre-lT3b | lT3b | (2R,6R) |
| 7 | [chemical structure] | 21b | 6 | pre-lU3b | lU3b | (2R,6R) |
| 8 | [chemical structure] | 21c | 6 | pre-lG3b | lG3b | (2R,6R) |
| 9 | [chemical structure] | 21e | 6 | pre-lA3b | lA3b | (2R,6R) |
| 10 | [chemical structure] | 21f | 6 | pre-lC3b | lC3b | (2R,6R) |
| 11 | [chemical structure] | 33e/ (36a) | 9/(10) | pre-lT4a | lT4a | (2S,6R) |
| 12 | [chemical structure] | 36b | 10 | pre-lU4a | lU4a | (2S,6R) |
| 13 | [chemical structure] | 36c | 10 | pre-lG4a | lG4a | (2S,6R) |
| 14 | [chemical structure] | 36e | 10 | pre-lA4a | lA4a | (2S,6R) |
| 15 | [chemical structure] | 36f | 11 | pre-lC4a | lC4a | (2S,6R) |
| 16 | [chemical structure] | 43a | 12 | pre-lT4b | lT4b | (2R,6R) |
| 17 | [chemical structure] | 43b | 12 | pre-lU4b | lU4b | (2R,6R) |
| 18 | [chemical structure] | 43c | 12 | pre-lG4b | lG4b | (2R,6R) |
| 19 | [chemical structure] | 43e | 12 | pre-lA4b | lA4b | (2R,6R) |
| 20 | [chemical structure] | 43f | 12 | pre-lC4b | lC4b | (2R,6R) |
| 21 | [chemical structure] | 33a | 9 | pre-lT2a | lT2a | (2S,6R) |
| 22 | [chemical structure] | 33b | 9 | pre-lT6a | lT6a | (2S,6R) |
| 23 | [chemical structure] | 33c | 9 | pre-lT7a | lT7a | (2S,6R) |
| 24 | [chemical structure] | 33d | 9 | pre-lT8a | lT8a | (2S,6R) |
| 25 | [chemical structure] | 33f | 9 | pre-lT5a | lT5a | (2S,6R) |
| 26 | [chemical structure] | 33g | 9 | pre-lT9a | lT9a | (2S,6R) |
| 27 | [chemical structure] | 33h | 9 | pre-lT10a | lT10a | (2S,6R) |

TABLE B
Non-targeting nucleotide analogs of formula (I) within the dioxane series

| | | | | | Name in | |
|---|---|---|---|---|---|---|
| | | Text | Synthetic | | oligonucleotide | Stereo- |
| N^{o} | Structure | number | scheme | Name | sequence | chemistry |
| 1 | [chemical structure] | 53a | 13 | pre-lT1a | lT1a | (2S,6R) |
| 2 | [chemical structure] | 53b | 14 | pre-lU1a | lU1a | (2S,6R) |
| 3 | [chemical structure] | 53c | 13 | pre-lG1a | lG1a | (2S,6R) |
| 4 | [chemical structure] | 53e | 13 | pre-lA1a | lA1a | (2S,6R) |
| 5 | [chemical structure] | 53f | 15 | pre-lC1a | lC1a | (2S,6R) |
| 6 | [chemical structure] | 67a | 16 | pre-lT1b | lT1b | (2R,6R) |
| 7 | [chemical structure] | 67b | 17 | pre-lU1b | lU1b | (2R,6R) |
| 8 | [chemical structure] | 67c | 16 | pre-lG1b | lG1b | (2R,6R) |
| 9 | [chemical structure] | 67e | 16 | pre-lA1b | lA1b | (2R,6R) |
| 10 | [chemical structure] | 67f | 16 | pre-lC1b | lC1b | (2R,6R) |

TABLE C
Targeting nucleotide analogs of formula (I)

| | | | | | Name in | |
|---|---|---|---|---|---|---|
| | | | Syn- | | oligo- | |
| | | Text | thetic | | nucleotide | Stereo- |
| N^{o} | Structure | number | scheme | Name | sequence | chemistry |
| 1 | [chemical structure] | 78a | 18 | pre-lgT9 | lgT9 | (2S,6R) |
| 2 | [chemical structure] | 78b | 18 | pre-lgT8 | lgT8 | (2S,6R) |
| 3 | [chemical structure] | 78c | 18 | pre-lgT7 | lgT7 | (2S,6R) |
| 4 | [chemical structure] | 78d | 18 | pre-lgT6 | lgT6 | (2S,6R) |
| 5 | [chemical structure] | 78e | 18 | pre-lgT5 | lgT5 | (2S,6R) |
| 6 | [chemical structure] | 78f | 18 | pre-lgT3 | lgT3 | (2S,6R) |
| 7 | [chemical structure] | 78g | 18 | pre-lgT4 | lgT4 | (2S,6R) |
| 8 | [chemical structure] | 84a | 20 | pre-lgT12 | lgT12 | (2S,6R) |
| 9 | [chemical structure] | 84b | 20 | pre-lgT11 | lgT11 | (2S,6R) |
| 10 | [chemical structure] | 84c | 20 | pre-lgT10 | lgT10 | (2S,6R) |
| 11 | [chemical structure] | 84d | 20 | pre-lgT1 | lgT1 | (2S,6R) |
| 12 | [chemical structure] | 84e | 20 | pre-lgT2 | lgT2 | (2S,6R) |

[1861] Synthesis of siRNAs Comprising Nucleotide Analogs and Targeted Nucleotide and Analogs

[1862] Oligonucleotide Synthesis and siRNA Preparation

[1863] All oligonucleotides were synthesized on a ABI 394 synthesizer. Commercially available (Sigma Aldrich) DNA-, RNA-, 2′-OMe-RNA and 2′-desoxy-F-RNA-phosphoramidites with standard protecting groups as 5′-O-dimethoxytrityl-thymidine-3′-O-(N,N-diisopropyl-2-cyanoethyl-phosphoramidite, 5′-O-dimethoxytrityl-2′-O-tert-butyldimethylsilyl-uracile-3′-O-(N,N-diisopropyl-2-cyanoethyl)-phosphoramidite, 5′-O-dimethoxytrityl-2′-O-tert-butyldimethylsilyl-N4-cytidine-3′-O-(N,N-diisopropyl-2-cyanoethyl)-phosphoramidite, 5′-O-dimethoxytrityl-2′-O-tert-butyldimethylsilyl-N6-benzoyl-adenosine-3′-O-(N,N-diisopropyl-2-cyanoethyl)-phosphoramidite,5′-O-dimethoxytrityl-2′-O-tert-butyldimethylsilyl-N2-isobutyryl-guanosine-3′-O-(N,N-diisopropyl-2-cyanoethyl)-phosphoramidite,5′-O-dimethoxy-trityl-2′-O-methyl-uracile-3′-O-(N,N-diisopropyl-2-cyanoethyl)-phosphoramidite, 5′-O-dimethoxytrityl-2′-O-methyl-N4-cytidine-3′-O-(N,N-diisopropyl-2-cyanoethyl)-phosphoramidite, 5′-O-dimethoxytrityl-2′-O-methyl-N6-benzoyl-adenosine-3′-O-(N,N-diisopropyl-2-cyanoethyl)-phosphoramidite, 5′-O-dimethoxytrityl-2′-O-methyl-N2-isobutyryl-guanosine-3′-O-(N,N-diisopropyl-2-cyanoethyl)-phosphoramidite,5′-O-dimethoxytrityl-2′-desoxy-fluoro-uracile-3′-O-(N,N-diisopropyl-2-cyanoethyl)-phosphoramidite, 5′-O-dimethoxytrityl-2′-desoxy-fluoro-N4-cytidine-3′-O-(N,N-diisopropyl-2-cyanoethyl)-phosphoramidite, 5′-O-dimethoxytrityl-2′-desoxy-fluoro-N6-benzoyl-adenosine-3′-O-(N,N-diisopropyl-2-cyanoethyl)-phosphoramidite and 5′-O-dimethoxytrityl-2′-desoxy-fluoro-N2-isobutyryl-guanosine-3′-O-(N,N-diisopropyl-2-cyanoethyl)-phosphoramidite as well as the corresponding solid support materials (CPG-500 Å, loading 40 μmol/g, ChemGenes) were used for automated oligonucleotide synthesis. For 3′-end cholesterol conjugates, solid support 3′-Cholesterol SynBase™ CPG1000 (link technologies) 32 μmol/g was used.

[1864] Phosphoramidite building blocks were used as 0.1 M solutions in acetonitrile and activated with 5-(bis-3,5-trifluoromethylphenyl)-1H-tetrazole (activator 42, 0.25 M in acetonitrile, Sigma Aldrich). Reaction times of 200 s were used for standard phosphoramidite couplings. In case of herein desribed phosphoramidites, listed in Tables A, B and C, coupling times of 300 s were applied. As capping reagents, acetic anhydride in THF (capA for ABI, Sigma Aldrich) and N-methylimidazole in THF (capB for ABI, Sigma Aldrich) were used. As oxidizing reagent, iodine in THF/pyridine/water (0.02 M; oxidizer for ABI, Sigma Aldrich) was used. Alternative, PS-oxidation was achieved with a 0.05 M solution of 3-((N,N-dimethyl-aminomethylidene)amino)-3H-1,2,4-dithiazole-5-thione (DDTT) in pyridine/acetonitrile (1:1). Deprotection of the DMT-protecting group was done using dichloroacetic acid in DCM (DCA deblock, Sigma Aldrich). Final cleavage from solid support and deprotection (acyl- and cyanoethyl-protecting groups) was achieved with NH₃ (32% aqueous solution/ethanol, v/v 3:1). Treatment with NMP/NEt₃/NEt₃.3 HF (3:1.5:2) was applied for TBDMS-deprotection.

[1865] Oligonucleotides with herein described morpholino- or dioxane building blocks at the 3′-end were synthesized on universal linker-solid support (CPG-500 Å, loading 39 μmol/g, AM Chemicals LLC) and the corresponding phosphoramidites shown in Tables A, B and C.

[1866] Crude products were analyzed by HPLC and purification of the single strands was performed by ion exchange or preparative HPLC-methods.

[1867] Ion exchange: ÄKTA purifier, (Thermo Fisher Scientific DNAPac PA200 semi prep ion exchange column, 8 μm particles, width 22 mm×length 250 mm).

[1868] buffer A: 1.50 l H₂O, 2.107 g NaClO₄, 438 mg EDTA, 1.818 g TRIS, 540.54 g urea, pH 7.4.

[1869] buffer B: 1.50 l H₂O, 105.34 g NaClO₄, 438 mg EDTA, 1.818 g TRIS, 540.54 g urea, pH 7.4.

[1870] Isolation of the oligonucleotides was achieved by precipitation, induced by the addition of 4 volumes of ethanol and storing at −20° C.

[1871] Preparative HPLC: Agilent 1100 series prep HPLC, (Waters XBridge®BEH C18 OBD™ Prep Column 130 Å, 5 μm, 10 mm×100 mm). Eluent: Triethylammonium acetate (0.1 M) in acetonitrile/water. After lyophilization, the products were dissolved in 1.0 ml 2.5 M NaCl-solution and 4.0 ml H₂O. The corresponding Na⁺-salts were isolated after precipitation by adding 20 ml ethanol and storing at −20° C. for 18 h.

[1872] Final analysis of the single strands was done by LC/MS-TOF methods. Results are shown in Tables D1 and D2.

[1873] For double strand formation, equimolar amounts of sense- and antisense strands were mixed in 1× PBS-buffer and heated to 85° C. for 10 min and slowly cooled down to room temperature. Final analysis of the siRNA-double strands was done by LC/MS-TOF methods. Results are shown in Tables E1 and E2.

[1874] Analytical Data of Single-Stranded and Double-Stranded Oligonucleotides

[1875] The analytical data from single-stranded oligonucleotides may be found in Tables D1 and D2 below.

TABLE D1
sense strands

| | MW(ss) | MW(ss) | |
|---|---|---|---|
| ss-# | calc. | found (m/z) | z |
| ss1-0 | 8044.6 | 8043.4 | 1 |
| ss1-1 | 8668.9 | 8668.3 | 1 |
| ss1-2 | 8807.0 | 8806.7 | 1 |
| ss1-3 | 8807.0 | 8806.7 | 1 |
| ss1-4 | 9467.6 | 9467.1 | 1 |
| ss2-1 | 9605.7 | 9603.6 | 1 |
| ss3-1 | 8807.0 | 8806.7 | 1 |
| ss3-2 | 8900.2 | 8899.7 | 1 |
| ss3-3 | 8888.2 | 8887.7 | 1 |
| ss3-4 | 8900.2 | 8899.8 | 1 |
| ss3-5 | 8888.2 | 8887.8 | 1 |
| ss3-6 | 8900.2 | 8899.8 | 1 |
| ss3-7 | 8888.2 | 8887.8 | 1 |
| ss3-8 | 8900.2 | 8899.8 | 1 |
| ss3-9 | 8888.2 | 8887.8 | 1 |
| ss3-10 | 8900.2 | 8899.8 | 1 |
| ss3-11 | 8900.2 | 8899.8 | 1 |
| ss3-12 | 8900.2 | 8899.9 | 1 |
| ss3-13 | 8888.2 | 8887.9 | 1 |
| ss3-14 | 8900.2 | 8899.9 | 1 |
| ss3-15 | 8888.2 | 8887.8 | 1 |
| ss3-16 | 8900.2 | 8899.8 | 1 |
| ss3-17 | 8888.2 | 8887.8 | 1 |
| ss3-18 | 8888.2 | 8887.8 | 1 |
| ss3-19 | 8900.2 | 8899.8 | 1 |
| ss3-20 | 8818.9 | 8818.7 | 1 |
| ss3-21 | 8806.9 | 8806.6 | 1 |
| ss3-22 | 8818.9 | 8818.7 | 1 |
| ss3-23 | 8806.9 | 8806.6 | 1 |
| ss3-24 | 8818.9 | 8818.6 | 1 |
| ss3-25 | 8806.9 | 8806.6 | 1 |
| ss3-26 | 8818.9 | 8818.6 | 1 |
| ss3-27 | 8806.98 | 8806.6 | 1 |
| ss3-28 | 8818.9 | 8818.7 | 1 |
| ss3-29 | 8818.9 | 8818.7 | 1 |
| ss3-30 | 8818.9 | 8818.7 | 1 |
| ss3-31 | 8818.9 | 8818.6 | 1 |
| ss3-32 | 8806.9 | 8806.6 | 1 |
| ss3-33 | 8818.9 | 8818.7 | 1 |
| ss3-34 | 8806.9 | 8806.7 | 1 |
| ss3-35 | 8818.9 | 8818.7 | 1 |
| ss3-36 | 8806.9 | 8806.7 | 1 |
| ss3-37 | 8818.9 | 8818.7 | 1 |
| ss3-38 | 8806.9 | 8806.7 | 1 |
| ss3-39 | 8818.9 | 8818.7 | 1 |

TABLE D2
antisense strands

| | MW(as) | MW(as) | |
|---|---|---|---|
| as-# | calc. | found (m/z) | z |
| as1-0 | 6903.5 | 6903.0 | 1 |
| as2-1(=as1-1) | 7596.0 | 7595.0 | 1 |
| as2-2 | 7703.2 | 7701.4 | 1 |
| as2-3 | 7671.1 | 7669.3 | 1 |
| as2-4 | 7677.1 | 7675.2 | 1 |
| as2-5 | 7703.2 | 7701.3 | 1 |
| as2-6 | 7677.1 | 7675.3 | 1 |
| as2-7 | 7668.2 | 2555.3 | 3 |
| as2-8 | 7689.2 | 7687.4 | 1 |
| as2-9 | 7664.2 | 7662.4 | 1 |
| as2-10 | 7677.2 | 7674.9 | 1 |
| as2-11 | 7677.2 | 7675.2 | 1 |
| as2-12 | 7596.0 | 3797.0 | 2 |
| as2-13 | 7596.0 | 7594.1 | 1 |
| as2-14 | 7668.2 | 7666.0 | 1 |
| as2-15 | 7587.0 | 7584.5 | 1 |
| as2-16 | 7689.2 | 7687.3 | 1 |
| as2-17 | 7664.2 | 7662.8 | 1 |
| as3-1 | 7596.0 | 7595.0 | 1 |
| as3-2 | 7677.1 | 7676.1 | 1 |
| as3-3 | 7689.2 | 7688.2 | 1 |
| as3-4 | 7677.1 | 7676.1 | 1 |
| as3-5 | 7689.2 | 7688.1 | 1 |
| as3-6 | 7677.1 | 7676.1 | 1 |
| as3-7 | 7689.2 | 7688.1 | 1 |
| as3-8 | 7677.1 | 7676.1 | 1 |
| as3-9 | 7689.2 | 7688.2 | 1 |
| as3-10 | 7677.1 | 7676.1 | 1 |
| as3-11 | 7689.2 | 7688.2 | 1 |
| as3-12 | 7677.1 | 7676.0 | 1 |
| as3-13 | 7677.1 | 7676.0 | 1 |
| as3-14 | 7677.1 | 7676.0 | 1 |
| as3-15 | 7689.2 | 7688.1 | 1 |
| as3-16 | 7677.1 | 7676.1 | 1 |
| as3-17 | 7689.2 | 7688.1 | 1 |
| as3-18 | 7677.1 | 7676.1 | 1 |
| as3-19 | 7689.2 | 7688.2 | 1 |
| as3-20 | 7677.1 | 7676.1 | 1 |
| as3-21 | 7689.2 | 7688.2 | 1 |
| as3-22 | 7677.1 | 7676.2 | 1 |
| as3-23 | 7758.3 | 7757.3 | 1 |
| as3-24 | 7770.3 | 7769.3 | 1 |
| as3-25 | 7758.3 | 7757.3 | 1 |
| as3-26 | 7770.3 | 7769.3 | 1 |
| as3-27 | 7758.3 | 7757.3 | 1 |
| as3-28 | 7770.3 | 7770.3 | 1 |
| as3-29 | 7758.3 | 7757.3 | 1 |
| as3-30 | 7770.3 | 7769.2 | 1 |
| as3-31 | 7758.3 | 7758.3 | 1 |
| as3-32 | 7758.3 | 7758.2 | 1 |
| as3-33 | 7758.3 | 7758.3 | 1 |
| as3-34 | 7770.3 | 7770.4 | 1 |
| as3-35 | 7758.3 | 7757.2 | 1 |
| as3-36 | 7770.3 | 7769.4 | 1 |
| as3-37 | 7758.3 | 7757.3 | 1 |
| as3-38 | 7770.3 | 7770.3 | 1 |
| as3-39 | 7758.3 | 7758.3 | 1 |
| as3-40 | 7770.3 | 7769.3 | 1 |
| as3-41 | 7758.3 | 7758.3 | 1 |
| as3-42 | 7596.1 | 7595.1 | 1 |
| as3-43 | 7608.2 | 7607.1 | 1 |
| as3-44 | 7596.1 | 7595.1 | 1 |
| as3-45 | 7608.2 | 7607.1 | 1 |
| as3-46 | 7596.1 | 7595.1 | 1 |
| as3-47 | 7608.2 | 7607.1 | 1 |
| as3-48 | 7596.1 | 7595.1 | 1 |
| as3-49 | 7608.2 | 7607.1 | 1 |
| as3-50 | 7596.1 | 7595.0 | 1 |
| as3-51 | 7608.2 | 7607.1 | 1 |
| as3-52 | 7596.1 | 7595.1 | 1 |
| as3-53 | 7596.1 | 7595.0 | 1 |
| as3-54 | 7596.1 | 7595.1 | 1 |
| as3-55 | 7608.2 | 7607.1 | 1 |
| as3-56 | 7596.1 | 7595.1 | 1 |
| as3-57 | 7608.2 | 7607.1 | 1 |
| as3-58 | 7596.1 | 7595.1 | 1 |
| as3-59 | 7608.2 | 7607.1 | 1 |
| as3-60 | 7596.1 | 7595.1 | 1 |
| as3-61 | 7608.2 | 7607.1 | 1 |
| as3-62 | 7596.1 | 7595.1 | 1 |
| as3-63 | 7596.3 | 7595.1 | 1 |
| as3-64 | 7608.3 | 7607.1 | 1 |
| as3-65 | 7596.3 | 7595.1 | 1 |
| as3-66 | 7608.3 | 7607.1 | 1 |
| as3-67 | 7596.3 | 7595.1 | 1 |
| as3-68 | 7608.3 | 7607.1 | 1 |
| as3-69 | 7608.3 | 7607.2 | 1 |
| as3-70 | 7596.3 | 7595.2 | 1 |
| as3-71 | 7608.3 | 7607.2 | 1 |
| as3-72 | 7596.3 | 7595.2 | 1 |
| as3-73 | 7596.3 | 7595.2 | 1 |
| as3-74 | 7596.3 | 7595.1 | 1 |
| as3-75 | 7608.3 | 7607.1 | 1 |
| as3-76 | 7596.3 | 7595.1 | 1 |
| as3-77 | 7608.3 | 7607.2 | 1 |
| as3-78 | 7596.3 | 7595.1 | 1 |
| as3-79 | 7608.3 | 7607.2 | 1 |
| as3-80 | 7596.3 | 7595.1 | 1 |
| as3-81 | 7608.3 | 7607.2 | 1 |
| as3-82 | 7596.3 | 7595.2 | 1 |

[1876] The analytical data from double-stranded oligonucleotides may be found in Tables E1 and E2 below.

TABLE E1
siRNAs

| | | | MW(siRNA) | MW(siRNA) | |
|---|---|---|---|---|---|
| siRNA # | ss-# | as-# | calc. | found (m/z) | z |
| siRNA1-0 | ss1-0 | as1-0 | 14948.1 | 2490.2; 2988.5 | 6; 5 |
| siRNA1-1 | ss1-1 | as1-1 | 16264.9 | 16263.7* | |
| siRNA1-2 | ss1-2 | as1-1 | 16403.0 | 2732.8 | 6 |
| siRNA1-3 | ss1-3 | as1-1 | 16403.0 | 2732.8 | 6 |
| siRNA1-4 | ss1-4 | as1-1 | 17063.6 | 2842.8 | 6 |
| siRNA2-1 | ss2-1 | as1-1 | 17201.6 | 2865.8 | 6 |
| siRNA2-2 | ss2-1 | as2-2 | 17308.8 | 2883.7 | 6 |
| siRNA2-3 | ss2-1 | as2-3 | 17276.7 | 2878.4 | 6 |
| siRNA2-4 | ss2-1 | as2-4 | 17282.8 | 2879.4 | 6 |
| siRNA2-5 | ss2-1 | as2-5 | 17308.8 | 2883.7 | 6 |
| siRNA2-6 | ss2-1 | as2-6 | 17282.8 | 2879.4 | 6 |
| siRNA2-7 | ss2-1 | as2-7 | 17273.8 | 2877.9 | 6 |
| siRNA2-8 | ss2-1 | as2-8 | 17294.9 | 2881.5 | 6 |
| siRNA2-9 | ss2-1 | as2-9 | 17269.9 | 2877.2 | 6 |
| siRNA2-10 | ss2-1 | as2-10 | 17282.9 | 2879.4 | 6 |
| siRNA2-11 | ss2-1 | as2-11 | 17282.9 | 2879.4 | 6 |
| siRNA2-12 | ss2-1 | as2-12 | 17201.7 | 2865.9 | 6 |
| siRNA2-13 | ss2-1 | as2-13 | 17201.7 | 2865.9 | 6 |
| siRNA2-14 | ss2-1 | as2-14 | 17273.8 | 2877.9 | 6 |
| siRNA2-15 | ss2-1 | as2-15 | 17192.7 | 2864.4 | 6 |
| siRNA2-16 | ss2-1 | as2-16 | 17294.9 | 2881.4 | 6 |
| siRNA2-17 | ss2-1 | as2-17 | 17269.9 | 2877.2 | 6 |
| siRNA3-1 | ss3-1 | as3-1 | 16264.9 | 7595.1; 8806.7 | 1; 1 |
| siRNA3-2 | ss3-1 | as3-2 | 16484.2 | 7676.3; 8806.8 | 1; 1 |
| siRNA3-3 | ss3-1 | as3-3 | 16496.2 | 7688.3; 8806.8 | 1; 1 |
| siRNA3-4 | ss3-1 | as3-4 | 16484.2 | 7676.3; 8806.7 | 1; 1 |
| siRNA3-5 | ss3-1 | as3-5 | 16496.2 | 7688.3; 8806.7 | 1; 1 |
| siRNA3-6 | ss3-1 | as3-6 | 16484.2 | 7676.3; 8806.7 | 1; 1 |
| siRNA3-7 | ss3-1 | as3-7 | 16496.2 | 7688.3; 8806.7 | 1; 1 |
| siRNA3-8 | ss3-1 | as3-8 | 16484.2 | 7676.3; 8806.7 | 1; 1 |
| siRNA3-9 | ss3-1 | as3-9 | 16496.2 | 7688.3; 8806.7 | 1; 1 |
| siRNA3-10 | ss3-1 | as3-10 | 16484.2 | 7676.3; 8806.7 | 1; 1 |
| siRNA3-11 | ss3-1 | as3-11 | 16496.2 | 7688.3; 8806.7 | 1; 1 |
| siRNA3-12 | ss3-1 | as3-12 | 16484.2 | 7676.3; 8806.7 | 1; 1 |
| siRNA3-13 | ss3-1 | as3-13 | 16484.2 | 7676.3; 8806.7 | 1; 1 |
| siRNA3-14 | ss3-1 | as3-14 | 16484.2 | 7676.3; 8806.7 | 1; 1 |
| siRNA3-15 | ss3-1 | as3-15 | 16496.2 | 7688.3; 8806.7 | 1; 1 |
| siRNA3-16 | ss3-1 | as3-16 | 16484.2 | 7676.2; 8806.7 | 1; 1 |
| siRNA3-17 | ss3-1 | as3-17 | 16496.2 | 7688.3; 8806.7 | 1; 1 |
| siRNA3-18 | ss3-1 | as3-18 | 16484.2 | 7676.2; 8806.7 | 1; 1 |
| siRNA3-19 | ss3-1 | as3-19 | 16496.2 | 7688.3; 8806.7 | 1; 1 |
| siRNA3-20 | ss3-1 | as3-20 | 16484.2 | 7676.2; 8806.7 | 1; 1 |
| siRNA3-21 | ss3-1 | as3-21 | 16496.2 | 7688.3; 8806.7 | 1; 1 |
| siRNA3-22 | ss3-1 | as3-22 | 16484.2 | 7676.2; 8806.7 | 1; 1 |
| siRNA3-23 | ss3-1 | as3-23 | 16565.4 | 7757.3; 8806.7 | 1; 1 |
| siRNA3-24 | ss3-1 | as3-24 | 16577.4 | 7769.3; 8806.7 | 1; 1 |
| siRNA3-25 | ss3-1 | as3-25 | 16565.3 | 7757.3; 8806.7 | 1; 1 |
| siRNA3-26 | ss3-1 | as3-26 | 16577.4 | 7769.3; 8806.7 | 1; 1 |
| siRNA3-27 | ss3-1 | as3-27 | 16565.3 | 7757.3; 8806.7 | 1; 1 |
| siRNA3-28 | ss3-1 | as3-28 | 16577.4 | 7770.3; 8806.7 | 1; 1 |
| siRNA3-29 | ss3-1 | as3-29 | 16565.4 | 7757.3; 8806.7 | 1; 1 |
| siRNA3-30 | ss3-1 | as3-30 | 16577.4 | 7769.4; 8806.7 | 1; 1 |
| siRNA3-31 | ss3-1 | as3-31 | 16565.4 | 7757.3; 8806.7 | 1; 1 |
| siRNA3-32 | ss3-1 | as3-32 | 16565.4 | 7757.4; 8806.7 | 1; 1 |
| siRNA3-33 | ss3-1 | as3-33 | 16565.3 | 7757.4; 8806.7 | 1; 1 |
| siRNA3-34 | ss3-1 | as3-34 | 16496.2 | 7769.3; 8806.7 | 1; 1 |
| siRNA3-35 | ss3-1 | as3-35 | 16565.4 | 7757.3; 8806.7 | 1; 1 |
| siRNA3-36 | ss3-1 | as3-36 | 16577.4 | 7769.3; 8806.7 | 1; 1 |
| siRNA3-37 | ss3-1 | as3-37 | 16565.4 | 7757.4; 8806.7 | 1; 1 |
| siRNA3-38 | ss3-1 | as3-38 | 16577.4 | 7769.3; 8806.7 | 1; 1 |
| siRNA3-39 | ss3-1 | as3-39 | 16565.4 | 7757.3; 8806.7 | 1; 1 |
| siRNA3-40 | ss3-1 | as3-40 | 16577.4 | 7769.4; 8806.7 | 1; 1 |
| siRNA3-41 | ss3-1 | as3-41 | 16565.4 | 7757.4; 8806.7 | 1; 1 |
| siRNA3-42 | ss3-2 | as3-8 | 16577.4 | 7676.3; 8899.8 | 1; 1 |
| siRNA3-43 | ss3-3 | as3-8 | 16565.3 | 7676.3; 8887.8 | 1; 1 |
| siRNA3-44 | ss3-4 | as3-8 | 16577.4 | 7676.3; 8899.8 | 1; 1 |
| siRNA3-45 | ss3-5 | as3-8 | 16565.3 | 7676.3; 8887.8 | 1; 1 |
| siRNA3-46 | ss3-6 | as3-8 | 16577.4 | 7676.3; 8899.9 | 1; 1 |
| siRNA3-47 | ss3-7 | as3-8 | 16565.3 | 7676.3; 8887.8 | 1; 1 |
| siRNA3-48 | ss3-8 | as3-8 | 16577.4 | 7676.3; 8899.8 | 1; 1 |
| siRNA3-49 | ss3-9 | as3-8 | 16565.3 | 7676.3; 8887.8 | 1; 1 |
| siRNA3-50 | ss3-10 | as3-8 | 16577.4 | 7676.3; 8899.8 | 1; 1 |
| siRNA3-51 | ss3-11 | as3-8 | 16577.4 | 7676.3; 8899.8 | 1; 1 |
| siRNA3-52 | ss3-12 | as3-8 | 16577.4 | 7676.3; 8899.8 | 1; 1 |
| siRNA3-53 | ss3-13 | as3-8 | 16565.3 | 7676.3; 8887.8 | 1; 1 |
| siRNA3-54 | ss3-14 | as3-8 | 16577.4 | 7676.3; 8899.8 | 1; 1 |
| siRNA3-55 | ss3-15 | as3-8 | 16565.3 | 7676.3; 8887.8 | 1; 1 |
| siRNA3-56 | ss3-16 | as3-8 | 16577.4 | 7676.3; 8899.8 | 1; 1 |
| siRNA3-57 | ss3-17 | as3-8 | 16565.3 | 7676.3; 8887.8 | 1; 1 |
| siRNA3-58 | ss3-18 | as3-8 | 16565.3 | 7676.3; 8887.8 | 1; 1 |
| siRNA3-59 | ss3-19 | as3-8 | 16577.4 | 7676.3; 8899.8 | 1; 1 |
| siRNA3-60 | ss3-1 | as3-42 | 16403.2 | 7595.1; 8806.7 | 1; 1 |
| siRNA3-61 | ss3-1 | as3-43 | 16415.2 | 7607.1; 8806.7 | 1; 1 |
| siRNA3-62 | ss3-1 | as3-44 | 16403.2 | 7595.1; 8806.7 | 1; 1 |
| siRNA3-63 | ss3-1 | as3-45 | 16415.2 | 7607.1; 8806.7 | 1; 1 |
| siRNA3-64 | ss3-1 | as3-46 | 16403.2 | 7595.1; 8806.7 | 1; 1 |
| siRNA3-65 | ss3-1 | as3-47 | 16415.2 | 7607.2; 8806.7 | 1; 1 |
| siRNA3-66 | ss3-1 | as3-48 | 16403.2 | 7595.3; 8806.8 | 1; 1 |
| siRNA3-67 | ss3-1 | as3-49 | 16415.2 | 7607.2; 8806.7 | 1; 1 |
| siRNA3-68 | ss3-1 | as3-50 | 16403.2 | 7595.1; 8806.7 | 1; 1 |
| siRNA3-69 | ss3-1 | as3-51 | 16415.2 | 7607.2; 8806.7 | 1; 1 |
| siRNA3-70 | ss3-1 | as3-52 | 16403.2 | 7595.1; 8806.7 | 1; 1 |
| siRNA3-71 | ss3-1 | as3-53 | 16403.2 | 7595.1; 8806.7 | 1; 1 |
| siRNA3-72 | ss3-1 | as3-54 | 16403.2 | 7595.3; 8806.8 | 1; 1 |
| siRNA3-73 | ss3-1 | as3-55 | 16415.2 | 7607.3; 8806.8 | 1; 1 |
| siRNA3-74 | ss3-1 | as3-56 | 16403.2 | 7595.2; 8806.8 | 1; 1 |
| siRNA3-75 | ss3-1 | as3-57 | 16415.2 | 7607.3; 8806.8 | 1; 1 |
| siRNA3-76 | ss3-1 | as3-58 | 16403.2 | 7595.2; 8806.8 | 1; 1 |
| siRNA3-77 | ss3-1 | as3-59 | 16415.2 | 7607.2; 8806.8 | 1; 1 |
| siRNA3-78 | ss3-1 | as3-60 | 16403.2 | 7595.2; 8806.8 | 1; 1 |
| siRNA3-79 | ss3-1 | as3-61 | 16415.2 | 7607.2; 8806.8 | 1; 1 |
| siRNA3-80 | ss3-1 | as3-62 | 16403.2 | 7595.2; 8806.8 | 1; 1 |
| siRNA3-81 | ss3-1 | as3-63 | 16403.4 | 7595.2; 8806.8 | 1; 1 |
| siRNA3-82 | ss3-1 | as3-64 | 16415.4 | 7607.2; 8806.8 | 1; 1 |
| siRNA3-83 | ss3-1 | as3-65 | 16403.3 | 7595.2; 8806.8 | 1; 1 |
| siRNA3-84 | ss3-1 | as3-66 | 16415.4 | 7607.2; 8806.8 | 1; 1 |
| siRNA3-85 | ss3-1 | as3-67 | 16403.3 | 7595.2; 8806.8 | 1; 1 |
| siRNA3-86 | ss3-1 | as3-68 | 16415.4 | 7607.2; 8806.8 | 1; 1 |
| siRNA3-87 | ss3-1 | as3-69 | 16403.2 | 7595.2; 8806.8 | 1; 1 |
| siRNA3-88 | ss3-1 | as3-70 | 16415.4 | 7607.2; 8806.8 | 1; 1 |
| siRNA3-89 | ss3-1 | as3-71 | 16403.4 | 7595.2; 8806.8 | 1; 1 |
| siRNA3-90 | ss3-1 | as3-72 | 16415.4 | 7607.3; 8806.8 | 1; 1 |
| siRNA3-91 | ss3-1 | as3-73 | 16403.3 | 7595.2; 8806.7 | 1; 1 |
| siRNA3-92 | ss3-1 | as3-74 | 16403.4 | 7595.2; 8806.7 | 1; 1 |
| siRNA3-93 | ss3-1 | as3-75 | 16403.3 | 7595.2; 8806.7 | 1; 1 |
| siRNA3-94 | ss3-1 | as3-76 | 16415.4 | 7607.2; 8806.7 | 1; 1 |
| siRNA3-95 | ss3-1 | as3-77 | 16403.4 | 7595.2; 8806.7 | 1; 1 |
| siRNA3-96 | ss3-1 | as3-78 | 16415.4 | 7607.3; 8806.8 | 1; 1 |
| siRNA3-97 | ss3-1 | as3-79 | 16403.4 | 7595.2; 8806.7 | 1; 1 |
| siRNA3-98 | ss3-1 | as3-80 | 16415.4 | 7607.2; 8806.8 | 1; 1 |
| siRNA3-99 | ss3-1 | as3-81 | 16403.4 | 7595.2; 8806.8 | 1; 1 |
| siRNA3-100 | ss3-1 | as3-82 | 16415.4 | 7607.2; 8806.8 | 1; 1 |
| siRNA3-101 | ss3-20 | as3-48 | 16414.7 | 7595.2; 8818.7 | 1; 1 |
| siRNA3-102 | ss3-21 | as3-48 | 16402.7 | 7595.2; 8806.7 | 1; 1 |
| siRNA3-103 | ss3-22 | as3-48 | 16414.8 | 7595.2; 8818.7 | 1; 1 |
| siRNA3-104 | ss3-23 | as3-48 | 16402.7 | 7595.2; 8806.7 | 1; 1 |
| siRNA3-105 | ss3-24 | as3-48 | 16414.7 | 7595.2; 8818.7 | 1; 1 |
| siRNA3-106 | ss3-25 | as3-48 | 16402.7 | 7595.2; 8806.7 | 1; 1 |
| siRNA3-107 | ss3-26 | as3-48 | 16414.7 | 7595.2; 8818.8 | 1; 1 |
| siRNA3-108 | ss3-27 | as3-48 | 16402.7 | 7595.2; 8806.7 | 1; 1 |
| siRNA3-109 | ss3-28 | as3-48 | 16414.8 | 7595.2; 8818.8 | 1; 1 |
| siRNA3-110 | ss3-29 | as3-48 | 16414.8 | 7595.2; 8818.8 | 1; 1 |
| siRNA3-111 | ss3-30 | as3-48 | 16414.8 | 7595.2; 8818.8 | 1; 1 |
| siRNA3-112 | ss3-31 | as3-48 | 16414.7 | 7595.2; 8818.8 | 1; 1 |
| siRNA3-113 | ss3-32 | as3-48 | 16402.7 | 7595.2; 8806.8 | 1; 1 |
| siRNA3-114 | ss3-33 | as3-48 | 16414.8 | 7595.0; 8818.5 | 1; 1 |
| siRNA3-115 | ss3-34 | as3-48 | 16402.7 | 7595.2; 8806.8 | 1; 1 |
| siRNA3-116 | ss3-35 | as3-48 | 16414.8 | 7595.2; 8818.8 | 1; 1 |
| siRNA3-117 | ss3-36 | as3-48 | 16402.7 | 7595.2; 8806.8 | 1; 1 |
| siRNA3-118 | ss3-37 | as3-48 | 16414.8 | 7595.2; 8818.8 | 1; 1 |
| siRNA3-119 | ss3-38 | as3-48 | 16402.7 | 7595.2; 8806.8 | 1; 1 |
| siRNA3-120 | ss3-39 | as3-48 | 16414.7 | 7594.9; 8818.5 | 1; 1 |

*both single strands (sense and antisense strands) found (see Table E2).

TABLE E2

| | | | MW (ss) found | MW (as) found |
|---|---|---|---|---|
| siRNA # | ss-# | as-# | (calc.) | (calc.) |
| siRNA1-1 | ss1-1 | as1-1 | 8668.6 (8668.9) | 7595.1 (7596.0) |

[1877] Materials and Methods of In Vitro Biological Assays

[1878] Tₘ-Determination

[1879] 1.0 μM solutions of the siRNAs in PBS-buffer (1× PBS) were heated in a spectrophotometer (Jasco V-650) from 20 to 90° C. with a heating rate of 1° C./min. The absorption was measured at 260 nm and plotted versus the corresponding temperature. After reaching 90° C., the solution was cooled down to 20° C. with the same rate of 1° C./min and the heating cooling cycle was repeated. The melting temperature was calculated as mean value of the inflection points of the two heating curves.

[1880] Cells and Tissue Culture

[1881] Primary hepatocytes from female C57BL/6 mice were isolated freshly before the experiments based on a protocol adapted from Seglen, P. O. (1976): Preparation of Isolated Rat Liver Cells; Methods in Cell Biology, 13: 29-83. Plating of isolated hepatocytes was done for 3-5 hours at 37° C., 5% CO2 and 95% RH in Williams' E medium (ThermoFisher, cat. no. 22551) supplemented with 2 mM glutamin (ThermoFisher, cat. no. 25030), 100 U/ml Penicillin-Streptomycin (ThermoFisher, cat. no. 15140), 1 μg/ml Dexamethason (Sigma, cat. no. D1756), 1× ITS solution (ThermoFisher, cat. no. 41400) and 5% FBS. After plating, the medium was changed to cultivation medium that was identical to plating medium except supplement of 1% FBS. No further medium change was done during the incubation period of 48 or 72 hours.

[1882] Human peripheral blood mononuclear cells (PBMCs) were isolated from approximately 16 mL of blood from three healthy donors that were collected in Vacutainer tubes coated with sodium heparin (BD, Heidelberg Germany) according to manufacturer's instructions.

[1883] Human Hep3B cells were grown at 37° C., 5% CO₂ and 95% RH, and cultivated in EMEM medium (ATCC, cat.no. 30-2003) supplemented with 10% FBS.

[1884] siRNA Transfections

[1885] For transfection of human PBMCs, 100 nM of the siRNAs were reverse transfected into 1×10⁵ PBMCs with 0.3 μL Lipofectamine 2000 per 96-well (N=2) in a total volume of 150 μL serum-free RPMI medium (ThermoFisher, cat. no. 11875) for 24 hours.

[1886] For knock-down experiments with primary mouse hepatocytes, 40,000 cells/well in Collagen-I coated 96-well plates were incubated for 72 hours under free uptake conditions with the TTR siRNAs at 10, 1 and 0.1 nM concentrations without further medium change. TTR mRNA expression analysis was done as described below (see “mRNA expression analysis”).

[1887] IC₅₀ Measurements

[1888] For IC₅₀ measurements in primary fresh mouse hepatocytes, 30,000 cells in Collagen-I coated 96-well plates were incubated for 48 hours under free uptake conditions with the siRNAs at concentrations ranging from 1 μM to 1 pM using 10-fold dilution steps. The half maximal inhibitory concentration (IC₅₀) for each siRNA was calculated by applying a Biostat-Speed statistical calculation tool. Results were obtained using the 4-parameter logistic model according to Ratkovsky and Reedy (1986, Biometrics, Vol. 42: 575-582). The adjustment was obtained by non-linear regression using the Levenberg-Marquardt algorithm in SAS v9.1.3 software.

[1889] mRNA Expression Analysis

[1890] 48 hours after siRNA transfection or free siRNA uptake, the cellular RNA was harvested by using Promega's SV96 total RNA isolation system (cat. no. Z3500) according to the manufacturer's protocol including a DNase step during the procedure.

[1891] For cDNA synthesis the Reverse Transcriptase kit (cat. no. N8080234) was used from ThermoFisher. cDNA synthesis from 30 ng RNA was performed using 1.2 μl 10×RT buffer, 2.64 μl MgCl₂ (25 mM), 2.4 μl dNTPs (10 mM), 0.6 μl random hexamers (50 μM), 0.6 μl Oligo(dT)16 (50 μM), 0.24 μl RNase inhibitor (20 U/μl) and 0.3 μl Multiscribe (50 U/μl) in a total volume of 12 μl. Samples were incubated at 25° C. for 10 minutes and 42° C. for 60 minutes. The reaction was stopped by heating to 95° C. for 5 minutes.

[1892] Mouse TTR mRNA levels were quantified by qPCR using the ThermoFisher TaqMan Universal PCR Master Mix (cat. no. 4305719) and the TaqMan Gene Expression assay Mm00443267_m1. PCR was performed in technical duplicates with the ABI Prism 7900 under the following PCR conditions: 2 minutes at 50° C., 10 minutes at 95° C., 40 cycles with 95° C. for 15 seconds and 1 minute at 60° C. PCR was set up as a simplex PCR detecting the target gene in one reaction and the housekeeping gene (mouse RPL37A) for normalization in a second reaction. The final volume for the PCR reaction was 12.5 μl in a 1×PCR master mix, RPL37A primers were used in a final concentration of 50 nM and the probe of 200 nM. The ΔΔCt method was applied to calculate relative expression levels of the target transcripts. Percentage of target gene expression was calculated by normalization based on the levels of LV2 non-silencing siRNA control sequence.

[1893] IFNα Determination

[1894] IFNα protein concentration was quantified in the supernatant of human PBMCs as follows: 25 μL of the cell culture supernatant was used for measurement of IFNα concentration applying a self-established electrochemiluminescence assay based on MesoScale Discovery's technology, and using a pan IFNα monoclonal capture antibody (MT1/3/5, Mabtech). Alternatively, human IFNα2a isoform-specific assay (cat. no. K151VHK) was applied based on MesoScale's U-PLEX platform and according to the supplier's protocol.

[1895] Cytotoxicity

[1896] Cytotoxicity of mouse TTR siRNAs was measured 72 hours after incubation with 30,000 primary fresh mouse hepatocytes under free uptake conditions by determining the ratio of cellular viability/toxicity in each sample. Cell viability was measured by determination of the intracellular ATP content using the CellTiter-Glo assay (Promega, cat. no. G7570) according to the manufacturer's protocol. Cell toxicity was measured in the supernatant using the LDH assay (Sigma, cat. no. 11644793001) according to the manufacturer's protocol.

[1897] pmirGLO Dual Luciferase Reporter Assay

[1898] In order to quantify siRNA seed region mediated off-targeting, a modified, partial 3′UTR mouse TTR sequence (NM_013697) was sub-cloned into the multiple cloning site of a commercially available, dual luciferase reporter-based pmirGLO screening plasmid (Promega, cat. no. E1330). Four consecutive mouse TTR siRNA seed sequence elements were flanked by approx. 60 respective up- and downstream nucleotides of the natural mouse TTR 3′UTR sequence:

[SEQ ID NO. 2]
TGAGAGACTCAGCCCAGGAGGACCAGGATCTTGCCAAAGCAGTAGCATC
CCATTTGTACCTTTTCTCACTAGAACCTCTATAAACTTTTCTCACTAGA
ACCTCTATAAACTTTTCTCACTAGAACCTCTATAAACTTTTCTCACTAG
AACCTCTATAAACCGTGTTAGCAGCTCAGGAAGATGCCGTGAAGCATTC
TTATTAAACCACCTGCTATTTCATTCAAA

[1899] TGA=stop codon of NM_013697, CTCTATAA=mouse TTR siRNA seed region

[1900] 10 μg of the pmirGLO-TTR plasmid was transiently transfected in a fast-forward setup for 18 hours into 4 millions. Hep3B cells in two T25 flasks (Greiner, cat. no. 690175) using FuGene HD transfection reagent (Promega, cat. no. E2311). 100, 10, 1 and 0.1 nM siRNA transfections of 5000 plasmid pre-transfected Hep3B cells per well in 384 well plates (Greiner, cat. no. 781098) using Lipofectamine RNAiMAX was done the next day in a reverse setup and cells were incubated for 72 hours. Relative luminescence signals were determined by measuring Firefly luciferase levels normalized to the levels of constitutively-expressed Renilla luciferase, also encoded by the pmirGLO plasmid, using the Dual-Glo Luciferase Assay (Promega, cat. no. E2940). Percentage of TTR gene knockdown was calculated by normalization based on the relative luminescence signal of the LV2 non-silencing siRNA control sequence.

### EXAMPLE 1

### In Vivo Inhibition of a Target Gene Expression with Modified siRNAs According to the Present Disclosure

TABLE 1a
sense strands (5′→3′) with lgT- and lT-overhangs

| SS-# | Sense strand sequences | remark |
|---|---|---|
| ss1-0 | lgT3-lgT3-1gT3-fA-mU-fC-mG-fU-mA-fC-mG-fU-mA-fC-mC-fG-mU-fC- | neg. Ctrl. |
| | mG-fU*mA*fU | SEQ ID NO. 3 |
| ss1-1 | lgT3-lgT3-lgT3-fA-mA-fC-mA-fG-mU-fG-mU-fU-fC-fU-mU-fG-mC-fU- | SEQ ID NO. 4 |
| | mC-fU-mA-fU*mA*fA | |
| ss1-2 | fA*mA*fC-mA-fG-mU-fG-mU-fU-fC-fU-mU-fG-mC-fU-mC-fU-mA-fU-mA- | SEQ ID NO. 5 |
| | fA-lgT7-lgT7-lgT7 | |
| ss1-3 | lgT7-lgT7-lgT7-fA-mA-fC-mA-fG-mU-fG-mU-fU-fC-fU-mU-fG-mC-fU- | SEQ ID NO. 6 |
| | mC-fU-mA-fU*mA*fA | |
| ss1-4 | lgT3-lgT3-1gT3-fA-mU-fC-mG-fU-mA-fC-mG-fU-mA-fC-mC-fG-mU-fC-mG- | SEQ ID NO. 7 |
| | fU-mA-fU-mA-fA-lT4a-lT4a | |

TABLE 1b
antisense strands (5′→3′)

| as-# | Antisense strand sequences | |
|---|---|---|
| as1-0 | fA*fU*mA-fC-mG-fA-mC-fG-mG-fU-mA-fC-mG-fU-mA-fC-mG-fA- | SEQ ID NO. 8 |
| | mU*dT*dT | |
| as1-1 | mU*fU*mA-fU-mA-fG-mA-fG-mC-fA-mA-mG-mA-fA-mC-fA-mC-fU- | SEQ ID NO. 9 |
| | mG-fU-mU*mU*mU | |

TABLE 1c
siRNAs with lgT- and lT-overhangs

| siRNA# | ss-# | as-# | remark |
|---|---|---|---|
| siRNA1-0 | ss1-0 | as1-0 | neg. ctrl. |
| siRNA1-1 | ss1-1 | as1-1 | |
| siRNA1-2 | ss1-2 | as1-1 | |
| siRNA1-3 | ss1-3 | as1-1 | |
| siRNA1-4 | ss1-4 | as1-1 | |

[1902] In-Vitro Results

[1903] The in vitro knock-down results in primary mouse hepatocytes of the compounds siRNA1-1 to siRNA1-4 are summarized in Table 1d.

TABLE 1d
IC₅₀-data of siRNAs in primary mouse hepatocytes

| siRNA# | IC₅₀ (pM) | Imax (%) |
|---|---|---|
| siRNA1-1 | 48 | 99.4 |
| siRNA1-2 | 15 | 100.3 |
| siRNA1-3 | 10 | 100.2 |
| siRNA1-4 | 60 | 99.9 |

[1904] All tested siRNAs with lgT-building blocks show high in-vitro potencies in the picomolar range upon free uptake. Comparison between lgT3- and lgT7-containing targeted nucleotide analogues show beneficial IC50-values for the lgT7-analogue (siRNA1-1 versus siRNA1-2 and siRNA1-3) with no significant difference between 3′- or 5′-end substitution (siRNA1-2 versus siRNA1-3). The comparison between siRNA1-1 and siRNA1-4 shows that there is no significant difference in the in-vitro potencies when additional lT4a-overhangs are attached to the 3′-end of the sense strand without any additional phosphothioate groups, resulting in a sense strand which does not have any phosphothioate stabilization at all.

[1905] All siRNAs (siRNA1-0 to siRNA1-4) with lgT- or lgT-and lT-overhangs were tested in IFNα- and cytotoxicity assay and did not show any effects on immune stimulation or cell viability.

### In Vivo Example 1.1

[1906] Demonstration of in-vivo activity of GalNAc-siRNA conjugates and comparison of impact of different GalNAc building blocks with and without additional lT4a-overhangs on RNA interfering activity.

[1907] Methods

[1908] C57BL/6N mice (female 20-22g; Charles River, Germany) were treated subcutaneously with a single dose of 5 mg/kg of PEG-GalNAc-siRNA or PBS (mock control) in groups of n=6. Sequences and chemical composition of administered compounds are listed in Table 1a to Table 1c. Blood samples were drawn pre- and post-dosing as indicated in FIG. 1. SiRNA target TTR was quantified from serum by a commercially available ELISA assay (Alpco Diagnostics, Cat.no.: 41-PALMS-E01).

[1909] Results (See FIG. 1)

[1910] As can been seen in FIG. 1, the attachment of three lgT7-building blocks at the 5′-end of the sense strand leads to significantly improved durations of action compared to the analogues compound with lgT3-building blocks (siRNA1-3 versus siRNA1-1). Using the same targeting nucleotide (lgT7), the attachment of three building blocks at the 5′-end showed a clear benefit over the analogues siRNA with the same targeting moieties at the 3′-end of the sense strand (siRNA1-3 versus siRNA1-2). Surprisingly, the combination of targeting nucleotides (lgT7) at the 5′-end of the sense strand with non-targeting nucleotide analogues (lT4a) at the 3′-end showed a clear improvement in the in-vivo durations of action compared to the analogues phosphothioate stabilized siRNA without additional lT4a building blocks (siRNA1-4 versus siRNA1-1).

[1911] These results clearly show that the morpholine-based nucleotide analogues display beneficial properties in-vivo, when used as GalNAc-substituted nucleotide analogs (lgTs) for hepatic siRNA-targeting.

### In Vivo Example 1.2

[1912] Dose dependent in-vivo activity and acute toxicity assessment of compounds selected from in vivo example 1.1.

[1913] Methods

[1914] Animal Study

[1915] C57BL/6N mice (female 20-22g; Charles River, Germany) were treated subcutaneously with a single dose of 0.5, 2.5 or 25 mg/kg of siRNA or PBS (mock control) in groups of n=6 (for 0.5 and 2.5 mg/kg) or n=5 (for 25 mg/kg). Sequences and chemical composition of administered compounds are referenced in Table 1a to Table 1c. Animals were taken down 48 h post treatment, blood drawn for hematology analysis, clinical chemistry and organs harvested and weighed. Hematology blood count was performed on a scil Vet animal blood counter and clinical chemistry analysis on a Roche Cobas system.

[1916] SiRNA target TTR was quantified from serum by a commercially available ELISA assay (Alpco Diagnostics, Cat.no.: 41-PALMS-E01).

[1917] Liver tissue was processed for RT-qPCR analysis by total RNA extraction including DNase digest (RNAeasy Mini Kit, Qiagen). TTR (TaqMan assay ID Mm00443267_m1) and reference mRNA (Actb (TaqMan assay ID 4352341E), Gapdh (TaqMan assay ID 4308313)) was quantified by qPCR on an ABI Prism 7900 system following Oligo-dT and Random Hexamer primed cDNA synthesis. The ΔΔCt method was applied to calculate relative expression levels of the target transcripts.

[1918] The upper right liver lobe, spleen and kidneys of 25 mg/kg treatment groups (+PBS) were Formalin fixed and pathologically evaluated for abnormalities following standard H&E staining.

[1919] Results (See FIGS. 2 and 3)

[1920] Both protein and mRNA levels were reduced by all tested active siRNAs in a dose dependent manner at 48 h post dosing. mRNA and protein reduction occurred in a paralleled fashion. Within the tested active substances, no significant differences were observed either on the protein or mRNA level at any dose.

[1921] No treatment dose dependent effects were observed in standard hematology and liver/kidney clinical chemistry assays. Also, no significant treatment dependent alterations of serum cytokines and effects on organ or body weight were observed at take down. All deviations were within normal physiological range or normal inter-animal variability. Histopathology evaluation of liver and spleen were without findings.

### EXAMPLE 2

### In Vivo Inhibition of a Target Gene Expression with Modified siRNAs According to the Present Disclosure

TABLE 2a
sense strands (5′→3′) with IgT- and IT-ends

| SS-# | Sense strand sequences | remark |
|---|---|---|
| ss1-0 | lgT3-lgT3-lgT3-fA-mU-fC-mG-fU-mA-fC-mG-fU-mA-fC-mC-fG-mU-fC- | SEQ ID NO. 10 |
| | mG-fU*mA*fU | |
| ss2-1 | lgT7-lgT7-lgT7-fA-mA-fC-mA-fG-mU-fG-mU-fU-fC-fU-mU-fG-mC-fU- | SEQ ID NO. 11 |
| | mC-fU-mA-fU-mA-fA-lT4a-lT4a | |

TABLE 2b
antisense strands (5′→3′) with internal IT-building blocks

| as-# | Antisense strand sequences | remark |
|---|---|---|
| as1-0 | fA*fU*mA-fC-mG-fA-mC-fG-mG-fU-mA-fC-mG-fU-mA-fC-mG-fA- | SEQ ID NO. 12 |
| | mU*dT*dT | |
| as2-1 | mU*fU*mA-fU-mA-fG-mA-fG-mC-fA-mA-mG-mA-fA-mC-fA-mC-fU- | pos. Ctrl. |
| | mG-fU-mU*mU*mU | SEQ ID NO. 13 |
| as2-2 | mU*lT4a*mA-fU-mA-fG-mA-fG-mC-fA-mA-mG-mA-fA-mC-fA-mC-fU- | SEQ ID NO. 14 |
| | mG-fU-mU*mU*mU | |
| as2-3 | mU-lT4a-mA-fU-mA-fG-mA-fG-mC-fA-mA-mG-mA-fA-mC-fA-mC-fU- | SEQ ID NO. 15 |
| | mG-fU-mU*mU*mU | |
| as2-4 | mU*fU*lA4a-fU-mA-fG-mA-fG-mC-fA-mA-mG-mA-fA-mC-fA-mC-fU- | SEQ ID NO. 16 |
| | mG-fU-mU*mU*mU | |
| as2-5 | mU*fU*mA-lT4a-mA-fG-mA-fG-mC-fA-mA-mG-mA-fA-mC-fA-mC-fU- | SEQ ID NO. 17 |
| | mG-fU-mU*mU*mU | |
| as2-6 | mU*fU*mA-fU-lA4a-fG-mA-fG-mC-fA-mA-mG-mA-fA-mC-fA-mC-fU- | SEQ ID NO. 18 |
| | mG-fU-mU*mU*mU | |
| as2-7 | mU*fU*mA-fU-lT4a-fG-mA-fG-mC-fA-mA-mG-mA-fA-mC-fA-mC-fU- | SEQ ID NO. 19 |
| | mG-fU-mU*mU*mU | |
| as2-8 | mU*fU*mA-fU-mA-lG4a-mA-fG-mC-fA-mA-mG-mA-fA-mC-fA-mC-fU- | SEQ ID NO. 20 |
| | mG-fU-mU*mU*mU | |
| as2-9 | mU*fU*mA-fU-mA-lT4a-mA-fG-mC-fA-mA-mG-mA-fA-mC-fA-mC-fU- | SEQ ID NO. 21 |
| | mG-fU-mU*mU*mU | |
| as2-10 | mU*fU*mA-fU-mA-fG-lA4a-fG-mC-fA-mA-mG-mA-fA-mC-fA-mC-fU- | SEQ ID NO. 22 |
| | mG-fU-mU*mU*mU | |
| as2-11 | mU*fU*mA-fU-mA-fG-lA4b-fG-mC-fA-mA-mG-mA-fA-mC-fA-mC-fU- | SEQ ID NO. 23 |
| | mG-fU-mU*mU*mU | |
| as2-12 | mU*fU*mA-fU-mA-fG-lAla-fG-mC-fA-mA-mG-mA-fA-mC-fA-mC-fU- | SEQ ID NO. 24 |
| | mG-fU-mU*mU*mU | |
| as2-13 | mU*fU*mA-fU-mA-fG-lAlb-fG-mC-fA-mA-mG-mA-fA-mC-fA-mC-fU- | SEQ ID NO. 25 |
| | mG-fU-mU*mU*mU | |
| as2-14 | mU*fU*mA-fU-mA-fG-lT4a-fG-mC-fA-mA-mG-mA-fA-mC-fA-mC-fU- | SEQ ID NO. 26 |
| | mG-fU-mU*mU*mU | |
| as2-15 | mU*fU*mA-fU-mA-fG-lTla-fG-mC-fA-mA-mG-mA-fA-mC-fA-mC-fU- | SEQ ID NO. 27 |
| | mG-fU-mU*mU*mU | |
| as2-16 | mU*fU*mA-fU-mA-fG-mA-lG4a-mC-fA-mA-mG-mA-fA-mC-fA-mC-fU- | SEQ ID NO. 28 |
| | mG-fU-mU*mU*mU | |
| as2-17 | mU*fU*mA-fU-mA-fG-mA-lT4a-mC-fA-mA-mG-mA-fA-mC-fA-mC-fU- | SEQ ID NO. 29 |
| | mG-fU-mU*mU*mU | |

TABLE 2c
siRNAs with lgT- and lT-overhangs

| siRNA# | ss-# | as-# |
|---|---|---|
| siRNA1-0 | ss1-0 | as1-0 |
| siRNA2-1 | ss2-1 | as2-1 |
| siRNA2-2 | ss2-1 | as2-2 |
| siRNA2-3 | ss2-1 | as2-3 |
| siRNA2-4 | ss2-1 | as2-4 |
| siRNA2-5 | ss2-1 | as2-5 |
| siRNA2-6 | ss2-1 | as2-6 |
| siRNA2-7 | ss2-1 | as2-7 |
| siRNA2-8 | ss2-1 | as2-8 |
| siRNA2-9 | ss2-1 | as2-9 |
| siRNA2-10 | ss2-1 | as2-10 |
| siRNA2-11 | ss2-1 | as2-11 |
| siRNA2-12 | ss2-1 | as2-12 |
| siRNA2-13 | ss2-1 | as2-13 |
| siRNA2-14 | ss2-1 | as2-14 |
| siRNA2-15 | ss2-1 | as2-15 |
| siRNA2-16 | ss2-1 | as2-16 |
| siRNA2-17 | ss2-1 | as2-17 |

[1923] The in-vitro knock-down results in primary mouse hepatocytes of the compounds siRNA2-1 to siRNA2-17 are summarized in Table 2d:

TABLE 2d
Residual expression of TTR-mRNA [%] in primary mouse
hepatocytes at 0.1, 1 and 10 nM siRNA-concentration

| siRNA# | 0.1 nM | 1 nM | 10 nM |
|---|---|---|---|
| siRNA2-1 | 98.9 | 61.3 | 1.7 |
| siRNA2-2 | 117.0 | 113.2 | 57.1 |
| siRNA2-3 | 124.1 | 113.2 | 60.9 |
| siRNA2-4 | 119.4 | 62.2 | 6.0 |
| siRNA2-5 | 119.7 | 95.1 | 11.1 |
| siRNA2-6 | 133.0 | 65.8 | 9.6 |
| siRNA2-7 | 125.1 | 86.1 | 20.2 |
| siRNA2-8 | 104.6 | 49.4 | 3.7 |
| siRNA2-9 | 113.2 | 92.9 | 14.6 |
| siRNA2-10 | 91.8 | 54.6 | 2.1 |
| siRNA2-11 | 98.8 | 43.4 | 1.5 |
| siRNA2-12 | 103.1 | 50.4 | 1.4 |
| siRNA2-13 | 113.5 | 36.1 | 1.6 |
| siRNA2-14 | 106.2 | 80.8 | 7.5 |
| siRNA2-15 | 100.1 | 40.8 | 1.6 |
| siRNA2-16 | 120.3 | 65.9 | 7.7 |
| siRNA2-17 | 112.1 | 69.2 | 8.9 |

[1924] At a concentration of 10 nM, almost all compounds show very high in-vitro potencies with almost quantitative reduction of the mRNA. Only siRNA2-2 and siRNA2-3 with the morpholino analog lA4a at position 2 of the antisense strand show very low in-vitro potencies with 57.1 and 60.9% remaining mRNA. In contrast to the 10 nM concentration, all siRNAs did not decrease the mRNA at the lowest concentration of 0.1 nM. The most differentiating concentration was at 1 nM, where siRNA2-2 and siRNA2-3 again show the weakest inhibition values. Incorporation of an lT4a-building block at position 4 leads to a reduced in-vitro potency (siRNA2-5). At positions 5, 6 and 7, incorporation of the building blocks of formula I with the correct nucleobases (siRNA2-6, siRNA2-8, siRNA2-10, siRNA2-11, siRNA2-12 and siRNA2-13) leads to high in-vitro potencies, whereas the corresponding double strand with a mismatch nucleobase at position 7 (siRNA2-14) again shows a reduced in-vitro knock-down. Surprisingly, siRNA2-11 and siRNA2-13 with (2R,6R)-stereochemistry at the morpholino- or dioxane building blocks (lA4b and lA1b respectively) are among the most potent compounds. At position 8, both siRNAs (siRNA2-16 and siRNA2-17) show similar potencies as the positive control siRNA2-1.

[1925] For the described siRNAs with sequence-internal building blocks of formula I, the corresponding Tₘ-values have been determined, which are summarized in Table 2e.

TABLE 2e
Tₘ-values of siRNAs2-1 to siRNAs2-17

| siRNA# | Tₘ [° C. ] | ΔTₘ [° C.] | remark |
|---|---|---|---|
| siRNA2-1 | 86.8 | — | pos. ctrl. |
| siRNA2-2 | 87.7 | +0.9 | |
| siRNA2-3 | 87.6 | +0.8 | |
| siRNA2-4 | 86.9 | +0.1 | |
| siRNA2-5 | 85.7 | −1.1 | |
| siRNA2-6 | 85.0 | −1.8 | |
| siRNA2-7 | 83.6 | −3.2 | |
| siRNA2-8 | 79.5 | −7.3 | |
| siRNA2-9 | 78.6 | −8.2 | |
| siRNA2-10 | 77.5 | −9.3 | |
| siRNA2-11 | 84.7 | −2.1 | |
| siRNA2-12 | 79.4 | −7.4 | |
| siRNA2-13 | 85.3 | −1.5 | |
| siRNA2-14 | 76.3 | −10.5 | |
| siRNA2-15 | 76.4 | −10.4 | |
| siRNA2-16 | 73.5 | −13.3 | |
| siRNA2-17 | 71.2 | −15.6 | |

[1926] Compared to the control siRNA2-1 (Tₘ=86.8° C.), the modified siRNAs show a decrease in their melting temperature depending on the position of the incorporated modified nucleotide analogs in the antisense strand. As expected, modifications at positions 2, 3 and 4 (siRNA2-2 to siRNA2-5) only show a small decrease in Tₘ, whereas modifications at higher positions lead to more pronounced Tₘ-reduction, with an extremely high reduction at position 8 (siRNA2-16 and siRNA2-17) with a Tₘ-decrease of 13.3° C. for the matched siRNA2-16 and 15.6° C. for the mismatched analog siRNA2-17.

[1927] Surprisingly, for the siRNAs with morpholino- or dioxane building blocks at position 7, there is a significant difference in Tₘ-values depending on the chirality of the incorporated scaffolds. In the case of the morpholino compounds, incorporation of a lA4a-nucleotide results in a Tₘ-value of 77.5° C., which is a reduction of 9.3° C. (siRNA2-10), whereas incorporation of the analogues morpholino compound lA4b with opposite stereochemistry at C-2, results in a Tₘ-value of 84.7, which is only a small decrease of 2.1° C. (siRNA2-11) compared to the control siRNA2-1. The same observation was made in the analogues dioxane pair. Incorporation of a lA1a-nucleotide analog at position 7 leads to the significant Tₘ-decrease to 79.4° C. (siRNA2-12), 7.4° C. lower than the control siRNA2-1. The analogoues modification with the opposite stereochemistry (lA1b) results in a Tₘ-value of 85.3° C., which is again only a marginal reduction of 1.5° C. (siRNA2-13). The duplex stability of an oligonucleotide double strand, which contains compounds of formula I at position 7, seems significantly influenced by the stereochemistry at C-2 of the incorporated nucleotide analogs. SiRNAs containing nucleotide analogs of formula I with (2S,6R)-stereochemistry show higher duplex destabilization and therefore lower Tₘ-values than their (2R,6R)-analogs.

TABLE 2f
Residual relative Luciferase signals [%] of
a TTR siRNA seed sequence modified pmirGLO reporter
plasmid transfected into human Hep3B cells and treated
with 0.1, 1, 10 and 100 nM siRNA concentrations.

| siRNA-# | 0.1 nM | 1 nM | 10 nM | 100 nM |
|---|---|---|---|---|
| siRNA2-1 | 91.7 | 86.9 | 41.3 | 34.6 |
| siRNA2-2 | 90.9 | 90.4 | 83.9 | 121.1 |
| siRNA2-3 | 85.6 | 103.6 | 108.3 | 118.7 |
| siRNA2-4 | 101.4 | 84.4 | 87.6 | 103.8 |
| siRNA2-5 | 101.2 | 95.4 | 113.0 | 78.7 |
| siRNA2-6 | 135.4 | 88.4 | 86.3 | 103.7 |
| siRNA2-7 | 96.9 | 94.1 | 111.1 | 104.9 |
| siRNA2-8 | 102.2 | 95.6 | 100.3 | 109.4 |
| siRNA2-9 | 95.2 | 110.9 | 87.9 | 100.3 |
| siRNA2-10 | 112.2 | 94.5 | 85.1 | 106.8 |
| siRNA2-11 | 105.2 | 102.2 | 85.4 | 109.8 |
| siRNA2-12 | 126.9 | 96.3 | 116.1 | 116.9 |
| siRNA2-13 | 102.8 | 91.2 | 97.9 | 99.0 |
| siRNA2-14 | 111.7 | 80.7 | 83.1 | 100.7 |
| siRNA2-15 | 98.1 | 92.0 | 80.6 | 92.3 |
| siRNA2-16 | 86.7 | 83.1 | 55.5 | 55.8 |
| siRNA2-17 | 86.8 | 86.5 | 70.7 | 65.5 |

[1928] With the given set-up of the dual luciferase reporter assay, the parent positive control siRNA2-1 showed the most pronounced binding to the TTR-siRNA-sequence at 10 and 100 nM siRNA-concentrations. Surprisingly, this potential off-target binding was abolished with compounds siRNA2-2 to siRNA2-15, with morpholino and dioxane building blocks at positions 2 to 7 of the antisense strand (see table 2a and 2c). Only modifications at position 8 for siRNA2-16 and siRNA2-17 again showed some effects at 10 and 100 nM concentrations, indicating potential off-target effects, although still less pronounced as in the positive control siRNA2-1.

[1929] These data support, that using morpholino or dioxane building blocks of formula I at least at positions 2 to 7 in the antisense strand have the potential to further improve the specificity profile of siRNA-molecules as the case may be.

[1930] In-Vivo Results

[1931] Description:

### In Vivo Example 2.1

[1932] Demonstration of in-vivo activity of siRNA-conjugates listed in Table 2c and comparison of their RNAi activity

[1933] Methods

[1934] C57BL/6N mice (female 20-22g; Charles River, Germany) were treated subcutaneously with a single dose of 1 mg/kg of siRNA or PBS (mock control) in groups of n=6. Sequences and chemical composition of administered compounds are listed in Table 2a to Table 2c. Blood samples were drawn pre- and post-dosing as indicated in FIGS. 4 and 5. SiRNA target TTR was quantified from serum by a commercially available ELISA assay (Alpco Diagnostics, Cat.no.: 41-PALMS-E01).

[1935] Results (See FIGS. 4 and 5)

[1936] As can be deduced from FIGS. 4 and 5, the siRNAs with the (2S,6R)-morpholino-analogs of compounds of formula I at positions 3, 4, 5, 6 and 8 showed significantly reduced in-vivo potency when compared to the positive control siRNA2-1. Similar results were obtained for siRNA2-10 and siRNA2-12 with (2S,6R)-morpholino- and (2S,6R)-dioxane-scaffolds at position 7 of the antisense strand, as well as their mismatch-analogs siRNA2-14 and siRNA2-15. Surprisingly, siRNA2-11 and siRNA2-13 showed comparable in-vivo potencies as the positive control compound siRNA2-1. In contrast to their significantly less potent counterparts (siRNA2-10 and siRNA2-12) with (2S,6R)-configured building blocks at position 7 (lA4a and lA1a respectively), these two siRNAs (siRNA2-11 and siRNA2-13) only differ in the stereochemistry at the C-2 atom of the morpholino- or dioxane building blocks (lA4b and lA1b respectively). Changing the chirality to the (2R,6R)-series led to a significant increase in the in-vivo potency in both, the morpholino- and dioxane-series.

### In Vivo Example 2.2

[1937] Dose dependent in-vivo activity and acute toxicity assessment of selected compounds from in-vivo example 2.1

[1938] Methods

[1939] Animal Study

[1940] C57BL/6N mice (female 20-22g; Charles River, Germany) were treated subcutaneously with a single dose of 0.5, 2.5 or 25 mg/kg of siRNA or PBS (mock control) in groups of n=6 (for 0.5 and 2.5 mg/kg) or n=5 (for 25 mg/kg). Sequences and chemical composition of administered compounds are referenced in Table 2a to Table 2c. Animals were taken down 48 h post treatment, blood drawn for hematology analysis, clinical chemistry and organs harvested and weighed. Hematology blood count was performed on a scil Vet animal blood counter and clinical chemistry analysis on a Roche Cobas system.

[1941] SiRNA target TTR was quantified from serum by a commercially available ELISA assay (Alpco Diagnostics, Cat.no.: 41-PALMS-E01).

[1942] Liver tissue was processed for RT-qPCR analysis by total RNA extraction including DNase digest (RNAeasy Mini Kit, Qiagen). TTR (TaqMan assay ID Mm00443267_m1) and reference mRNA (Actb (TaqMan assay ID 4352341E), Gapdh (TaqMan assay ID 4308313)) was quantified by qPCR on an ABI Prism 7900 system following Oligo-dT and Random Hexamer primed cDNA synthesis. The ΔΔCt method was applied to calculate relative expression levels of the target transcripts.

[1943] The upper right liver lobe, spleen and kidneys of 25 mpk treatment groups (+PBS) were Formalin fixed and pathologically evaluated for abnormalities following standard H&E staining.

[1944] Results (See FIGS. 6 and 7)

[1945] Both, protein and mRNA levels were reduced by all tested active siRNAs in a dose dependent manner at 48 h post dosing. mRNA and protein reduction occurred in a paralleled fashion. Within the tested active substances, no significant differences were observed either on the protein or mRNA level at any dose.

[1946] No treatment dose dependent effects were observed in standard hematology and liver/kidney clinical chemistry assays. Also, no significant treatment dependent alterations of serum cytokines and effects on organ or body weight were observed at take down. All deviations were within normal physiological range or normal inter-animal variability. Histopathology evaluation of liver and spleen were without findings.

### EXAMPLE 3

### In Vitro Inhibition of a Target Gene Expression with Modified siRNAs According to the Present Disclosure

[1947] In an siRNA-sequence, targeting the TTR-mRNA, which was already used in the Examples 1 and 2, both strands were modified with morpholino and dioxane-based nucleotides in the sense and antisense strand. The obtained sequences, which all show at least one morpholino or dioxane building block in the antisense strand, were than tested in-vitro on their mRNA knock down in primary mouse hepatocytes as described under the “siRNA transfections” and “mRNA expression analysis” sections of the above indicated Materials & Methods. The sequences of sense and antisense strands and the corresponding siRNA-oligonucleotides are listed in Tables 3a, 3b and 3c.

[1948] The in-vitro knock-down results in primary mouse hepatocytes of the compounds siRNA3-1 to siRNA3-120 are summarized in Table 3d.

TABLE 3a
sense strands (5′→3′) with morpholine-based lB4b- and dioxane-based lB1b-
scaffolds

| SS-# | Sense strand sequences | remark |
|---|---|---|
| ss3-1 | lgT7-lgT7-lgT7-fA-mA-fC-mA-fG-mU-fG-mU-fU-fC- | = ss1-3 |
| | fU-mU-fG-mC-fU-mC-fU-mA-fU*mA*fA | pos. Ctrl. |
| | | SEQ ID No 30 |
| ss3-2 | lgT7-lgT7-lgT7-lA4b-mA-fC-mA-fG-mU-fG-mU-fU- | SEQID No 31 |
| | fC-fU-mU-fG-mC-fU-mC-fU-mA-fU*mA*fA | |
| ss3-3 | lgT7-lgT7-lgT7-fA-lA4b-fC-mA-fG-mU-fG-mU-fU- | SEQ ID No 32 |
| | fC-fU-mU-fG-mC-fU-mC-fU-mA-fU*mA*fA | |
| ss3-4 | lgT7-lgT7-lgT7-fA-mA-lC4b-mA-fG-mU-fG-mU-fU- | SEQ ID No 33 |
| | fC-fU-mU-fG-mC-fU-mC-fU-mA-fU*mA*fA | |
| ss3-5 | lgT7-lgT7-lgT7-fA-mA-fC-lA4b-fG-mU-fG-mU-fU- | SEQ ID No 34 |
| | fC-fU-mU-fG-mC-fU-mC-fU-mA-fU*mA*fA | |
| ss3-6 | lgT7-lgT7-lgT7-fA-mA-fC-mA-lG4b-mU-fG-mU-fU- | SEQ ID No 35 |
| | fC-fU-mU-fG-mC-fU-mC-fU-mA-fU*mA*fA | |
| ss3-7 | lgT7-lgT7-lgT7-fA-mA-fC-mA-fG-lU4b-fG-mU-fU- | SEQ ID No 36 |
| | fC-fU-mU-fG-mC-fU-mC-fU-mA-fU*mA*fA | |
| ss3-8 | lgT7-lgT7-lgT7-fA-mA-fC-mA-fG-mU-lG4b-mU-fU- | SEQ ID No 37 |
| | fC-fU-mU-fG-mC-fU-mC-fU-mA-fU*mA*fA | |
| ss3-9 | lgT7-lgT7-lgT7-fA-mA-fC-mA-fG-mU-fG-lU4b-fU- | SEQ ID No 38 |
| | fC-fU-mU-fG-mC-fU-mC-fU-mA-fU*mA*fA | |
| ss3-10 | lgT7-lgT7-lgT7-fA-mA-fC-mA-fG-mU-fG-mU-lU4b- | SEQ ID No 39 |
| | fC-fU-mU-fG-mC-fU-mC-fU-mA-fU*mA*fA | |
| ss3-11 | lgT7-lgT7-lgT7-fA-mA-fC-mA-fG-mU-fG-mU-fU- | SEQ ID No 40 |
| | lC4b-fU-mU-fG-mC-fU-mC-fU-mA-fU*mA*fA | |
| ss3-12 | lgT7-lgT7-lgT7-fA-mA-fC-mA-fG-mU-fG-mU-fU-fC- | SEQ ID No 41 |
| | lU4b-mU-fG-mC-fU-mC-fU-mA-fU*mA*fA | |
| ss3-13 | lgT7-lgT7-lgT7-fA-mA-fC-mA-fG-mU-fG-mU-fU-fC- | SEQ ID No 42 |
| | fU-lU4b-fG-mC-fU-mC-fU-mA-fU*mA*fA | |
| ss3-14 | lgT7-lgT7-lgT7-fA-mA-fC-mA-fG-mU-fG-mU-fU-fC- | SEQ ID No 43 |
| | fU-mU-fG-mC-lU4b-mC-fU-mA-fU*mA*fA | |
| ss3-15 | lgT7-lgT7-lgT7-fA-mA-fC-mA-fG-mU-fG-mU-fU-fC- | SEQ ID No 44 |
| | fU-mU-fG-mC-fU-lC4b-fU-mA-fU*mA*fA | |
| ss3-16 | lgT7-lgT7-lgT7-fA-mA-fC-mA-fG-mU-fG-mU-fU-fC- | SEQ ID No 45 |
| | fU-mU-fG-mC-fU-mC-lU4b-mA-fU*mA*fA | |
| ss3-17 | lgT7-lgT7-lgT7-fA-mA-fC-mA-fG-mU-fG-mU-fU-fC- | SEQ ID No 46 |
| | fU-mU-fG-mC-fU-mC-fU-lA4b-fU*mA*fA | |
| ss3-18 | lgT7-lgT7-lgT7-fA-mA-fC-mA-fG-mU-fG-mU-fU-fC- | SEQ ID No 47 |
| | fU-mU-fG-mC-fU-mC-fU-mA-fU*lA4b*fA | |
| ss3-19 | lgT7-lgT7-lgT7-fA-mA-fC-mA-fG-mU-fG-mU-fU-fC- | SEQ ID No 48 |
| | fU-mU-fG-mC-fU-mC-fU-mA-fU*mA*lA4b | |
| ss3-20 | lgT7-lgT7-lgT7-lA1b-mA-fC-mA-fG-mU-fG-mU-fU- | SEQ ID No 49 |
| | fC-fU-mU-fG-mC-fU-mC-fU-mA-fU*mA*fA | |
| ss3-21 | lgT7-lgT7-lgT7-fA-lA1b-fC-mA-fG-mU-fG-mU-fU- | SEQ ID No 50 |
| | fC-fU-mU-fG-mC-fU-mC-fU-mA-fU*mA*fA | |
| ss3-22 | lgT7-lgT7-lgT7-fA-mA-1C1b-mA-fG-mU-fG-mU-fU- | SEQ ID No 51 |
| | fC-fU-mU-fG-mC-fU-mC-fU-mA-fU*mA*fA | |
| ss3-23 | lgT7-lgT7-lgT7-fA-mA-fC-lA1b-fG-mU-fG-mU-fU- | SEQ ID No 52 |
| | fC-fU-mU-fG-mC-fU-mC-fU-mA-fU*mA*fA | |
| ss3-24 | lgT7-lgT7-lgT7-fA-mA-fC-mA-lG1b-mU-fG-mU-fU- | SEQ ID No 53 |
| | fC-fU-mU-fG-mC-fU-mC-fU-mA-fU*mA*fA | |
| ss3-25 | lgT7-lgT7-lgT7-fA-mA-fC-mA-fG-lU1b-fG-mU-fU- | SEQ ID No 54 |
| | fC-fU-mU-fG-mC-fU-mC-fU-mA-fU*mA*fA | |
| ss3-26 | lgT7-lgT7-lgT7-fA-mA-fC-mA-fG-mU-lG1b-mU-fU- | SEQ ID No 55 |
| | fC-fU-mU-fG-mC-fU-mC-fU-mA-fU*mA*fA | |
| ss3-27 | lgT7-lgT7-lgT7-fA-mA-fC-mA-fG-mU-fG-lU1b-fU- | SEQ ID No 56 |
| | fC-fU-mU-fG-mC-fU-mC-fU-mA-fU*mA*fA | |
| ss3-28 | lgT7-lgT7-lgT7-fA-mA-fC-mA-fG-mU-fG-mU-lU1b- | SEQ ID No 57 |
| | fC-fU-mU-fG-mC-fU-mC-fU-mA-fU*mA*fA | |
| ss3-29 | lgT7-lgT7-lgT7-fA-mA-fC-mA-fG-mU-fG-mU-fU- | SEQ ID No 58 |
| | lC1b-fU-mU-fG-mC-fU-mC-fU-mA-fU*mA*fA | |
| ss3-30 | lgT7-lgT7-lgT7-fA-mA-fC-mA-fG-mU-fG-mU-fU-fC- | SEQ ID No 59 |
| | lU1b-mU-fG-mC-fU-mC-fU-mA-fU*mA*fA | |
| ss3-31 | lgT7-lgT7-lgT7-fA-mA-fC-mA-fG-mU-fG-mU-fU-fC- | SEQ ID No 60 |
| | fU-mU-lG1b-mC-fU-mC-fU-mA-fU*mA*fA | |
| ss3-32 | lgT7-lgT7-lgT7-fA-mA-fC-mA-fG-mU-fG-mU-fU-fC- | SEQ ID No 61 |
| | fU-mU-fG-lC1b-fU-mC-fU-mA-fU*mA*fA | |
| ss3-33 | lgT7-lgT7-lgT7-fA-mA-fC-mA-fG-mU-fG-mU-fU-fC- | SEQ ID No 62 |
| | fU-mU-fG-mC-lU1b-mC-fU-mA-fU*mA*fA | |
| ss3-34 | lgT7-lgT7-lgT7-fA-mA-fC-mA-fG-mU-fG-mU-fU-fC- | SEQ ID No 63 |
| | fU-mU-fG-mC-fU-lC1b-fU-mA-fU*mA*fA | |
| ss3-35 | lgT7-lgT7-lgT7-fA-mA-fC-mA-fG-mU-fG-mU-fU-fC- | SEQ ID No 64 |
| | fU-mU-fG-mC-fU-mC-lU1b-mA-fU*mA*fA | |
| ss3-36 | lgT7-lgT7-lgT7-fA-mA-fC-mA-fG-mU-fG-mU-fU-fC- | SEQ ID No 65 |
| | fU-mU-fG-mC-fU-mC-fU-lA1b-fU*mA*fA | |
| ss3-37 | lgT7-lgT7-lgT7-fA-mA-fC-mA-fG-mU-fG-mU-fU-fC- | SEQ ID No 66 |
| | fU-mU-fG-mC-fU-mC-fU-mA-lU1b*mA*fA | |
| ss3-38 | lgT7-lgT7-lgT7-fA-mA-fC-mA-fG-mU-fG-mU-fU-fC- | SEQ ID No 67 |
| | fU-mU-fG-mC-fU-mC-fU-mA-fU*lA1b*fA | |
| ss3-39 | lgT7-lgT7-lgT7-fA-mA-fC-mA-fG-mU-fG-mU-fU-fC- | SEQ ID No 68 |
| | fU-mU-fG-mC-fU-mC-fU-mA-fU*mA*lA1b | |

TABLE 3b
antisense strands (5′→3′) with morpholine-based lB4b- and dioxane-based lB1b- scaffolds

| as-# | Antisense strand sequences | remark |
|---|---|---|
| as3-l | mU*fU*mA-fU-mA-fG-mA-fG-mC-fA-mA-mG-mA-fA-mC-fA- | SEQ ID No 69 |
| | mC-fU-mG-fU-mU*mU*mU | |
| as3-2 | lU4b*fU*mA-fU-mA-fG-mA-fG-mC-fA-mA-mG-mA-fA-mC- | SEQ ID No 70 |
| | fA-mC-fU-mG-fU-mU*mU*mU | |
| as3-3 | mU*lU4b*mA-fU-mA-fG-mA-fG-mC-fA-mA-mG-mA-fA-mC- | SEQ ID No 71 |
| | fA-mC-fU-mG-fU-mU*mU*mU | |
| as3-4 | mU*fU*lA4b-fU-mA-fG-mA-fG-mC-fA-mA-mG-mA-fA-mC- | SEQ ID No 72 |
| | fA-mC-fU-mG-fU-mU*mU*mU | |
| as3-5 | mU*fU*mA-lU4b-mA-fG-mA-fG-mC-fA-mA-mG-mA-fA-mC- | SEQ ID No 73 |
| | fA-mC-fU-mG-fU-mU*mU*mU | |
| as3-6 | mU*fU*mA-fU-lA4b-fG-mA-fG-mC-fA-mA-mG-mA-fA-mC- | SEQ ID No 74 |
| | fA-mC-fU-mG-fU-mU*mU*mU | |
| as3-7 | mU*fU*mA-fU-mA-lG4b-mA-fG-mC-fA-mA-mG-mA-fA-mC- | SEQ ID No 75 |
| | fA-mC-fU-mG-fU-mU*mU*mU | |
| as3-8 | mU*fU*mA-fU-mA-fG-lA4b-fG-mC-fA-mA-mG-mA-fA-mC- | SEQ ID No 76 |
| | fA-mC-fU-mG-fU-mU*mU*mU | |
| as3-9 | mU*fU*mA-fU-mA-fG-mA-lG4b-mC-fA-mA-mG-mA-fA-mC- | SEQ ID No 77 |
| | fA-mC-fU-mG-fU-mU*mU*mU | |
| as3-10 | mU*fU*mA-fU-mA-fG-mA-fG-lC4b-fA-mA-mG-mA-fA-mC- | SEQ ID No 78 |
| | fA-mC-fU-mG-fU-mU*mU*mU | |
| as3-11 | mU*fU*mA-fU-mA-fG-mA-fG-mC-lA4b-mA-mG-mA-fA-mC- | SEQ ID No 79 |
| | fA-mC-fU-mG-fU-mU*mU*mU | |
| as3-12 | mU*fU*mA-fU-mA-fG-mA-fG-mC-fA-lA4b-mG-mA-fA-mC- | SEQ ID No 80 |
| | fA-mC-fU-mG-fU-mU*mU*mU | |
| as3-13 | mU*fU*mA-fU-mA-fG-mA-fG-mC-fA-mA-lG4b-mA-fA-mC- | SEQ ID No 81 |
| | fA-mC-fU-mG-fU-mU*mU*mU | |
| as3-14 | mU*fU*mA-fU-mA-fG-mA-fG-mC-fA-mA-mG-lA4b-fA-mC- | SEQ ID No 82 |
| | fA-mC-fU-mG-fU-mU*mU*mU | |
| as3-15 | mU*fU*mA-fU-mA-fG-mA-fG-mC-fA-mA-mG-mA-lA4b-mC- | SEQ ID No 83 |
| | fA-mC-fU-mG-fU-mU*mU*mU | |
| as3-16 | mU*fU*mA-fU-mA-fG-mA-fG-mC-fA-mA-mG-mA-fA-lC4b- | SEQ ID No 84 |
| | fA-mC-fU-mG-fU-mU*mU*mU | |
| as3-17 | mU*fU*mA-fU-mA-fG-mA-fG-mC-fA-mA-mG-mA-fA-mC- | SEQ ID No 85 |
| | lA4b-mC-fU-mG-fU-mU*mU*mU | |
| as3-18 | mU*fU*mA-fU-mA-fG-mA-fG-mC-fA-mA-mG-mA-fA-mC-fA- | SEQ ID No 86 |
| | lC4b-fU-mG-fU-mU*mU*mU | |
| as3-19 | mU*fU*mA-fU-mA-fG-mA-fG-mC-fA-mA-mG-mA-fA-mC-fA- | SEQ ID No 87 |
| | mC-lU4b-mG-fU-mU*mU*mU | |
| as3-20 | mU*fU*mA-fU-mA-fG-mA-fG-mC-fA-mA-mG-mA-fA-mC-fA- | SEQ ID No 88 |
| | mC-fU-lG4b-fU-mU*mU*mU | |
| as3-21 | mU*fU*mA-fU-mA-fG-mA-fG-mC-fA-mA-mG-mA-fA-mC-fA- | SEQ ID No 89 |
| | mC-fU-mG-lU4b-mU*mU*mU | |
| as3-22 | mU*fU*mA-fU-mA-fG-mA-fG-mC-fA-mA-mG-mA-fA-mC-fA- | SEQ ID No 90 |
| | mC-fU-mG-fU-lU4b*mU*mU | |
| as3-23 | lU4b*fU*mA-fU-mA-fG-lA4b-fG-mC-fA-mA-mG-mA-fA- | SEQ ID No 91 |
| | mC-fA-mC-fU-mG-fU-mU*mU*mU | |
| as3-24 | mU*lU4b*mA-fU-mA-fG-lA4b-fG-mC-fA-mA-mG-mA-fA- | SEQ ID No 92 |
| | mC-fA-mC-fU-mG-fU-mU*mU*mU | |
| as3-25 | mU*fU*lA4b-fU-mA-fG-lA4b-fG-mC-fA-mA-mG-mA-fA- | SEQ ID No 93 |
| | mC-fA-mC-fU-mG-fU-mU*mU*mU | |
| as3-26 | mU*fU*mA-lU4b-mA-fG-lA4b-fG-mC-fA-mA-mG-mA-fA- | SEQ ID No 94 |
| | mC-fA-mC-fU-mG-fU-mU*mU*mU | |
| as3-27 | mU*fU*mA-fU-lA4b-fG-lA4b-fG-mC-fA-mA-mG-mA-fA- | SEQ ID No 95 |
| | mC-fA-mC-fU-mG-fU-mU*mU*mU | |
| as3-28 | mU*fU*mA-fU-mA-lG4b-lA4b-fG-mC-fA-mA-mG-mA-fA- | SEQ ID No 96 |
| | mC-fA-mC-fU-mG-fU-mU*mU*mU | |
| as3-29 | mU*fU*mA-fU-mA-fG-lA4b-fG-1C4b-fA-mA-mG-mA-fA- | SEQ ID No 97 |
| | mC-fA-mC-fU-mG-fU-mU*mU*mU | |
| as3-30 | mU*fU*mA-fU-mA-fG-lA4b-fG-mC-lA4b-mA-mG-mA-fA- | SEQ ID No 98 |
| | mC-fA-mC-fU-mG-fU-mU*mU*mU | |
| as3-31 | mU*fU*mA-fU-mA-fG-lA4b-fG-mC-fA-lA4b-mG-mA-fA- | SEQ ID No 99 |
| | mC-fA-mC-fU-mG-fU-mU*mU*mU | |
| as3-32 | mU*fU*mA-fU-mA-fG-lA4b-fG-mC-fA-mA-lG4b-mA-fA- | SEQ ID No 100 |
| | mC-fA-mC-fU-mG-fU-mU*mU*mU | |
| as3-33 | mU*fU*mA-fU-mA-fG-lA4b-fG-mC-fA-mA-mG-lA4b-fA- | SEQ ID No 101 |
| | mC-fA-mC-fU-mG-fU-mU*mU*mU | |
| as3-34 | mU*fU*mA-fU-mA-fG-lA4b-fG-mC-fA-mA-mG-mA-lA4b- | SEQ ID No 102 |
| | mC-fA-mC-fU-mG-fU-mU*mU*mU | |
| as3-35 | mU*fU*mA-fU-mA-fG-lA4b-fG-mC-fA-mA-mG-mA-fA- | SEQ ID No 103 |
| | lC4b-fA-mC-fU-mG-fU-mU*mU*mU | |
| as3-36 | mU*fU*mA-fU-mA-fG-lA4b-fG-mC-fA-mA-mG-mA-fA-mC- | SEQ ID No 104 |
| | lA4b-mC-fU-mG-fU-mU*mU*mU | |
| as3-37 | mU*fU*mA-fU-mA-fG-lA4b-fG-mC-fA-mA-mG-mA-fA-mC- | SEQ ID No 105 |
| | fA-lC4b-fU-mG-fU-mU*mU*mU | |
| as3-38 | mU*fU*mA-fU-mA-fG-lA4b-fG-mC-fA-mA-mG-mA-fA-mC- | SEQ ID No 106 |
| | fA-mC-lU4b-mG-fU-mU*mU*mU | |
| as3-39 | mU*fU*mA-fU-mA-fG-lA4b-fG-mC-fA-mA-mG-mA-fA-mC- | SEQ ID No 107 |
| | fA-mC-fU-lG4b-fU-mU*mU*mU | |
| as3-40 | mU*fU*mA-fU-mA-fG-lA4b-fG-mC-fA-mA-mG-mA-fA-mC- | SEQ ID No 108 |
| | fA-mC-fU-mG-lU4b-mU*mU*mU | |
| as3-41 | mU*fU*mA-fU-mA-fG-lA4b-fG-mC-fA-mA-mG-mA-fA-mC- | SEQ ID No 109 |
| | fA-mC-fU-mG-fU-lU4b*mU*mU | |
| as3-42 | lU1b*fU*mA-fU-mA-fG-mA-fG-mC-fA-mA-mG-mA-fA-mC- | SEQ ID No 110 |
| | fA-mC-fU-mG-fU-mU*mU*mU | |
| as3-43 | mU*lU1b*mA-fU-mA-fG-mA-fG-mC-fA-mA-mG-mA-fA-mC- | SEQ ID No 111 |
| | fA-mC-fU-mG-fU-mU*mU*mU | |
| as3-44 | mU*fU*lA1b-fU-mA-fG-mA-fG-mC-fA-mA-mG-mA-fA-mC- | SEQ ID No 112 |
| | fA-mC-fU-mG-fU-mU*mU*mU | |
| as3-45 | mU*fU*mA-lU1b-mA-fG-mA-fG-mC-fA-mA-mG-mA-fA-mC- | SEQ ID No 113 |
| | fA-mC-fU-mG-fU-mU*mU*mU | |
| as3-46 | mU*fU*mA-fU-lA1b-fG-mA-fG-mC-fA-mA-mG-mA-fA-mC- | SEQ ID No 114 |
| | fA-mC-fU-mG-fU-mU*mU*mU | |
| as3-47 | mU*fU*mA-fU-mA-lG1b-mA-fG-mC-fA-mA-mG-mA-fA-mC- | SEQ ID No 115 |
| | fA-mC-fU-mG-fU-mU*mU*mU | |
| as3-48 | mU*fU*mA-fU-mA-fG-lA1b-fG-mC-fA-mA-mG-mA-fA-mC- | SEQ ID No 116 |
| | fA-mC-fU-mG-fU-mU*mU*mU | |
| as3-49 | mU*fU*mA-fU-mA-fG-mA-lG1b-mC-fA-mA-mG-mA-fA-mC- | SEQ ID No 117 |
| | fA-mC-fU-mG-fU-mU*mU*mU | |
| as3-50 | mU*fU*mA-fU-mA-fG-mA-fG-lC1b-fA-mA-mG-mA-fA-mC- | SEQ ID No 118 |
| | fA-mC-fU-mG-fU-mU*mU*mU | |
| as3-51 | mU*fU*mA-fU-mA-fG-mA-fG-mC-lA1b-mA-mG-mA-fA-mC- | SEQ ID No 119 |
| | fA-mC-fU-mG-fU-mU*mU*mU | |
| as3-52 | mU*fU*mA-fU-mA-fG-mA-fG-mC-fA-lA1b-mG-mA-fA-mC- | SEQ ID No 120 |
| | fA-mC-fU-mG-fU-mU*mU*mU | |
| as3-53 | mU*fU*mA-fU-mA-fG-mA-fG-mC-fA-mA-lG1b-mA-fA-mC- | SEQ ID No 121 |
| | fA-mC-fU-mG-fU-mU*mU*mU | |
| as3-54 | mU*fU*mA-fU-mA-fG-mA-fG-mC-fA-mA-mG-lA1b-fA-mC- | SEQ ID No 122 |
| | fA-mC-fU-mG-fU-mU*mU*mU | |
| as3-55 | mU*fU*mA-fU-mA-fG-mA-fG-mC-fA-mA-mG-mA-lA1b-mC- | SEQ ID No 123 |
| | fA-mC-fU-mG-fU-mU*mU*mU | |
| as3-56 | mU*fU*mA-fU-mA-fG-mA-fG-mC-fA-mA-mG-mA-fA-lC1b- | SEQ ID No 124 |
| | fA-mC-fU-mG-fU-mU*mU*mU | |
| as3-57 | mU*fU*mA-fU-mA-fG-mA-fG-mC-fA-mA-mG-mA-fA-mC- | SEQ ID No 125 |
| | lA1b-mC-fU-mG-fU-mU*mU*mU | |
| as3-58 | mU*fU*mA-fU-mA-fG-mA-fG-mC-fA-mA-mG-mA-fA-mC-fA- | SEQ ID No 126 |
| | lC1b-fU-mG-fU-mU*mU*mU | |
| as3-59 | mU*fU*mA-fU-mA-fG-mA-fG-mC-fA-mA-mG-mA-fA-mC-fA- | SEQ ID No 127 |
| | mC-lU1b-mG-fU-mU*mU*mU | |
| as3-60 | mU*fU*mA-fU-mA-fG-mA-fG-mC-fA-mA-mG-mA-fA-mC-fA- | SEQ ID No 128 |
| | mC-fU-lG1b-fU-mU*mU*mU | |
| as3-61 | mU*fU*mA-fU-mA-fG-mA-fG-mC-fA-mA-mG-mA-fA-mC-fA- | SEQ ID No 129 |
| | mC-fU-mG-lU1b-mU*mU*mU | |
| as3-62 | mU*fU*mA-fU-mA-fG-mA-fG-mC-fA-mA-mG-mA-fA-mC-fA- | SEQ ID No 130 |
| | mC-fU-mG-fU-lU1b*mU*mU | |
| as3-63 | lU1b*fU*mA-fU-mA-fG-lA1b-fG-mC-fA-mA-mG-mA-fA- | SEQ ID No 131 |
| | mC-fA-mC-fU-mG-fU-mU*mU*mU | |
| as3-64 | mU*lU1b*mA-fU-mA-fG-lA1b-fG-mC-fA-mA-mG-mA-fA- | SEQ ID No 132 |
| | mC-fA-mC-fU-mG-fU-mU*mU*mU | |
| as3-65 | mU*fU*lA1b-fU-mA-fG-lA1b-fG-mC-fA-mA-mG-mA-fA- | SEQ ID No 133 |
| | mC-fA-mC-fU-mG-fU-mU*mU*mU | |
| as3-66 | mU*fU*mA-lU1b-mA-fG-lA1b-fG-mC-fA-mA-mG-mA-fA- | SEQ ID No 134 |
| | mC-fA-mC-fU-mG-fU-mU*mU*mU | |
| as3-67 | mU*fU*mA-fU-lA1b-fG-lA1b-fG-mC-fA-mA-mG-mA-fA- | SEQ ID No 135 |
| | mC-fA-mC-fU-mG-fU-mU*mU*mU | |
| as3-68 | mU*fU*mA-fU-mA-lG1b-lA1b-fG-mC-fA-mA-mG-mA-fA- | SEQ ID No 136 |
| | mC-fA-mC-fU-mG-fU-mU*mU*mU | |
| as3-69 | mU*fU*mA-fU-mA-fG-lA1b-lG1b-mC-fA-mA-mG-mA-fA- | SEQ ID No 137 |
| | mC-fA-mC-fU-mG-fU-mU*mU*mU | |
| as3-70 | mU*fU*mA-fU-mA-fG-lA1b-fG-1C1b-fA-mA-mG-mA-fA- | SEQ ID No 138 |
| | mC-fA-mC-fU-mG-fU-mU*mU*mU | |
| as3-71 | mU*fU*mA-fU-mA-fG-lA1b-fG-mC-lA1b-mA-mG-mA-fA- | SEQ ID No 139 |
| | mC-fA-mC-fU-mG-fU-mU*mU*mU | |
| as3-72 | mU*fU*mA-fU-mA-fG-lA1b-fG-mC-fA-lA1b-mG-mA-fA- | SEQ ID No 140 |
| | mC-fA-mC-fU-mG-fU-mU*mU*mU | |
| as3-73 | mU*fU*mA-fU-mA-fG-lA1b-fG-mC-fA-mA-lG1b-mA-fA- | SEQ ID No 141 |
| | mC-fA-mC-fU-mG-fU-mU*mU*mU | |
| as3-74 | mU*fU*mA-fU-mA-fG-lA1b-fG-mC-fA-mA-mG-lA1b-fA- | SEQ ID No 142 |
| | mC-fA-mC-fU-mG-fU-mU*mU*mU | |
| as3-75 | mU*fU*mA-fU-mA-fG-lA1b-fG-mC-fA-mA-mG-mA-lA1b- | SEQ ID No 143 |
| | mC-fA-mC-fU-mG-fU-mU*mU*mU | |
| as3-76 | mU*fU*mA-fU-mA-fG-lA1b-fG-mC-fA-mA-mG-mA-fA- | SEQ ID No 144 |
| | lC1b-fA-mC-fU-mG-fU-mU*mU*mU | |
| as3-77 | mU*fU*mA-fU-mA-fG-lA1b-fG-mC-fA-mA-mG-mA-fA-mC- | SEQ ID No 145 |
| | lA1b-mC-fU-mG-fU-mU*mU*mU | |
| as3-78 | mU*fU*mA-fU-mA-fG-lA1b-fG-mC-fA-mA-mG-mA-fA-mC- | SEQ ID No 146 |
| | fA-lC1b-fU-mG-fU-mU*mU*mU | |
| as3-79 | mU*fU*mA-fU-mA-fG-lA1b-fG-mC-fA-mA-mG-mA-fA-mC- | SEQ ID No 147 |
| | fA-mC-lU1b-mG-fU-mU*mU*mU | |
| as3-80 | mU*fU*mA-fU-mA-fG-lA1b-fG-mC-fA-mA-mG-mA-fA-mC- | SEQ ID No 148 |
| | fA-mC-fU-lG1b-fU-mU*mU*mU | |
| as3-81 | mU*fU*mA-fU-mA-fG-lA1b-fG-mC-fA-mA-mG-mA-fA-mC- | SEQ ID No 149 |
| | fA-mC-fU-mG-lU1b-mU*mU*mU | |
| as3-82 | mU*fU*mA-fU-mA-fG-lA1b-fG-mC-fA-mA-mG-mA-fA-mC- | SEQ ID No 150 |
| | fA-mC-fU-mG-fU-lU1b*mU*mU | |

TABLE 3c
siRNA double strands with morpholine-based
lB4b- and dioxane-based lB1b- scaffolds

| siRNA# | ss-# | as-# |
|---|---|---|
| siRNA1-0 | ss1-0 | as1-0 |
| siRNA3-1 | ss3-1 | as3-1 |
| siRNA3-2 | ss3-1 | as3-2 |
| siRNA3-3 | ss3-1 | as3-3 |
| siRNA3-4 | ss3-1 | as3-4 |
| siRNA3-5 | ss3-1 | as3-5 |
| siRNA3-6 | ss3-1 | as3-6 |
| siRNA3-7 | ss3-1 | as3-7 |
| siRNA3-8 | ss3-1 | as3-8 |
| siRNA3-9 | ss3-1 | as3-9 |
| siRNA3-10 | ss3-1 | as3-10 |
| siRNA3-11 | ss3-1 | as3-11 |
| siRNA3-12 | ss3-1 | as3-12 |
| siRNA3-13 | ss3-1 | as3-13 |
| siRNA3-14 | ss3-1 | as3-14 |
| siRNA3-15 | ss3-1 | as3-15 |
| siRNA3-16 | ss3-1 | as3-16 |
| siRNA3-17 | ss3-1 | as3-17 |
| siRNA3-18 | ss3-1 | as3-18 |
| siRNA3-19 | ss3-1 | as3-19 |
| siRNA3-20 | ss3-1 | as3-20 |
| siRNA3-21 | ss3-1 | as3-21 |
| siRNA3-22 | ss3-1 | as3-22 |
| siRNA3-23 | ss3-1 | as3-23 |
| siRNA3-24 | ss3-1 | as3-24 |
| siRNA3-25 | ss3-1 | as3-25 |
| siRNA3-26 | ss3-1 | as3-26 |
| siRNA3-27 | ss3-1 | as3-27 |
| siRNA3-28 | ss3-1 | as3-28 |
| siRNA3-29 | ss3-1 | as3-29 |
| siRNA3-30 | ss3-1 | as3-30 |
| siRNA3-31 | ss3-1 | as3-31 |
| siRNA3-32 | ss3-1 | as3-32 |
| siRNA3-33 | ss3-1 | as3-33 |
| siRNA3-34 | ss3-1 | as3-34 |
| siRNA3-35 | ss3-1 | as3-35 |
| siRNA3-36 | ss3-1 | as3-36 |
| siRNA3-37 | ss3-1 | as3-37 |
| siRNA3-38 | ss3-1 | as3-38 |
| siRNA3-39 | ss3-1 | as3-39 |
| siRNA3-40 | ss3-1 | as3-40 |
| siRNA3-41 | ss3-1 | as3-41 |
| siRNA3-42 | ss3-2 | as3-8 |
| siRNA3-43 | ss3-3 | as3-8 |
| siRNA3-44 | ss3-4 | as3-8 |
| siRNA3-45 | ss3-5 | as3-8 |
| siRNA3-46 | ss3-6 | as3-8 |
| siRNA3-47 | ss3-7 | as3-8 |
| siRNA3-48 | ss3-8 | as3-8 |
| siRNA3-49 | ss3-9 | as3-8 |
| siRNA3-50 | ss3-10 | as3-8 |
| siRNA3-51 | ss3-11 | as3-8 |
| siRNA3-52 | ss3-12 | as3-8 |
| siRNA3-53 | ss3-13 | as3-8 |
| siRNA3-54 | ss3-14 | as3-8 |
| siRNA3-55 | ss3-15 | as3-8 |
| siRNA3-56 | ss3-16 | as3-8 |
| siRNA3-57 | ss3-17 | as3-8 |
| siRNA3-58 | ss3-18 | as3-8 |
| siRNA3-59 | ss3-19 | as3-8 |
| siRNA3-60 | ss3-1 | as3-42 |
| siRNA3-61 | ss3-1 | as3-43 |
| siRNA3-62 | ss3-1 | as3-44 |
| siRNA3-63 | ss3-1 | as3-45 |
| siRNA3-64 | ss3-1 | as3-46 |
| siRNA3-65 | ss3-1 | as3-47 |
| siRNA3-66 | ss3-1 | as3-48 |
| siRNA3-67 | ss3-1 | as3-49 |
| siRNA3-68 | ss3-1 | as3-50 |
| siRNA3-69 | ss3-1 | as3-51 |
| siRNA3-70 | ss3-1 | as3-52 |
| siRNA3-71 | ss3-1 | as3-53 |
| siRNA3-72 | ss3-1 | as3-54 |
| siRNA3-73 | ss3-1 | as3-55 |
| siRNA3-74 | ss3-1 | as3-56 |
| siRNA3-75 | ss3-1 | as3-57 |
| siRNA3-76 | ss3-1 | as3-58 |
| siRNA3-77 | ss3-1 | as3-59 |
| siRNA3-78 | ss3-1 | as3-60 |
| siRNA3-79 | ss3-1 | as3-61 |
| siRNA3-80 | ss3-1 | as3-62 |
| siRNA3-81 | ss3-1 | as3-63 |
| siRNA3-82 | ss3-1 | as3-64 |
| siRNA3-83 | ss3-1 | as3-65 |
| siRNA3-84 | ss3-1 | as3-66 |
| siRNA3-85 | ss3-1 | as3-67 |
| siRNA3-86 | ss3-1 | as3-68 |
| siRNA3-87 | ss3-1 | as3-69 |
| siRNA3-88 | ss3-1 | as3-70 |
| siRNA3-89 | ss3-1 | as3-71 |
| siRNA3-90 | ss3-1 | as3-72 |
| siRNA3-91 | ss3-1 | as3-73 |
| siRNA3-92 | ss3-1 | as3-74 |
| siRNA3-93 | ss3-1 | as3-75 |
| siRNA3-94 | ss3-1 | as3-76 |
| siRNA3-95 | ss3-1 | as3-77 |
| siRNA3-96 | ss3-1 | as3-78 |
| siRNA3-97 | ss3-1 | as3-79 |
| siRNA3-98 | ss3-1 | as3-80 |
| siRNA3-99 | ss3-1 | as3-81 |
| siRNA3-100 | ss3-1 | as3-82 |
| siRNA3-101 | ss3-20 | as3-48 |
| siRNA3-102 | ss3-21 | as3-48 |
| siRNA3-103 | ss3-22 | as3-48 |
| siRNA3-104 | ss3-23 | as3-48 |
| siRNA3-105 | ss3-24 | as3-48 |
| siRNA3-106 | ss3-25 | as3-48 |
| siRNA3-107 | ss3-26 | as3-48 |
| siRNA3-108 | ss3-27 | as3-48 |
| siRNA3-109 | ss3-28 | as3-48 |
| siRNA3-110 | ss3-29 | as3-48 |
| siRNA3-111 | ss3-30 | as3-48 |
| siRNA3-112 | ss3-31 | as3-48 |
| siRNA3-113 | ss3-32 | as3-48 |
| siRNA3-114 | ss3-33 | as3-48 |
| siRNA3-115 | ss3-34 | as3-48 |
| siRNA3-116 | ss3-35 | as3-48 |
| siRNA3-117 | ss3-36 | as3-48 |
| siRNA3-118 | ss3-37 | as3-48 |
| siRNA3-119 | ss3-38 | as3-48 |
| siRNA3-120 | ss3-39 | as3-48 |

TABLE 3d
Residual expression of TTR-mRNA [%] in primary mouse
hepatocytes at 0.1, 1.0 and 10.0 nM siRNA-concentration

| siRNA-# | 0.1 nM | 1.0 nM | 10.0 nM |
|---|---|---|---|
| untreated* | 101.39 | 101.55 | 106.45 |
| siRNA1-0** | 100.00 | 100.00 | 100.00 |
| siRNA2-1* | 91.95 | 52.40 | 3.20 |
| siRNA3-1*** | 60.47 | 20.78 | 0.88 |
| siRNA3-2 | 98.23 | 103.44 | 74.09 |
| siRNA3-3 | 95.23 | 91.19 | 48.18 |
| siRNA3-4 | 98.76 | 93.25 | 25.28 |
| siRNA3-5 | 95.11 | 85.97 | 12.13 |
| siRNA3-6 | 82.97 | 58.92 | 2.31 |
| siRNA3-7 | 94.21 | 79.59 | 4.05 |
| siRNA3-8 | 64.92 | 31.76 | 0.79 |
| siRNA3-9 | 75.55 | 29.08 | 0.88 |
| siRNA3-10 | 80.98 | 48.97 | 1.68 |
| siRNA3-11 | 69.82 | 28.40 | 1.17 |
| siRNA3-12 | 85.06 | 72.00 | 2.07 |
| siRNA3-13 | 76.22 | 39.47 | 1.55 |
| siRNA3-14 | 74.81 | 36.12 | 1.33 |
| siRNA3-15 | 89.71 | 76.23 | 5.51 |
| siRNA3-16 | 76.15 | 48.92 | 1.36 |
| siRNA3-17 | 81.58 | 25.81 | 1.09 |
| siRNA3-18 | 81.96 | 45.57 | 1.58 |
| siRNA3-19 | 80.07 | 40.12 | 1.10 |
| siRNA3-20 | 75.04 | 45.01 | 1.57 |
| siRNA3-21 | 78.86 | 66.23 | 2.55 |
| siRNA3-22 | 82.72 | 39.43 | 1.85 |
| siRNA3-23 | 99.91 | 84.78 | 77.59 |
| siRNA3-24 | 102.55 | 81.00 | 93.85 |
| siRNA3-25 | 97.53 | 80.33 | 94.87 |
| siRNA3-26 | 101.59 | 80.67 | 76.74 |
| siRNA3-27 | 99.77 | 66.31 | 6.47 |
| siRNA3-28 | 89.89 | 84.00 | 24.84 |
| siRNA3-29 | 92.39 | 55.95 | 4.14 |
| siRNA3-30 | 87.98 | 44.42 | 1.80 |
| siRNA3-31 | 95.76 | 88.92 | 16.27 |
| siRNA3-32 | 80.81 | 52.15 | 2.96 |
| siRNA3-33 | 103.84 | 82.50 | 8.32 |
| siRNA3-34 | 107.35 | 82.71 | 36.29 |
| siRNA3-35 | 105.76 | 68.41 | 9.09 |
| siRNA3-36 | 99.35 | 66.52 | 3.91 |
| siRNA3-37 | 94.49 | 65.80 | 18.07 |
| siRNA3-38 | 91.15 | 46.53 | 1.94 |
| siRNA3-39 | 86.17 | 60.15 | 2.13 |
| siRNA3-40 | 89.76 | 52.74 | 4.97 |
| siRNA3-41 | 86.26 | 59.20 | 2.14 |
| siRNA3-42 | 77.53 | 34.33 | 2.45 |
| siRNA3-43 | 83.83 | 33.18 | 1.81 |
| siRNA3-44 | 93.16 | 44.19 | 2.44 |
| siRNA3-45 | 87.61 | 43.46 | 2.57 |
| siRNA3-46 | 90.86 | 52.41 | 2.37 |
| siRNA3-47 | 90.30 | 57.52 | 2.45 |
| siRNA3-48 | 85.90 | 61.15 | 2.26 |
| siRNA3-49 | 86.02 | 49.68 | 2.31 |
| siRNA3-50 | 83.19 | 53.24 | 1.61 |
| siRNA3-51 | 91.28 | 44.57 | 1.78 |
| siRNA3-52 | 71.68 | 31.73 | 2.16 |
| siRNA3-53 | 94.53 | 55.05 | 2.64 |
| siRNA3-54 | 91.15 | 48.10 | 1.60 |
| siRNA3-55 | 85.86 | 50.10 | 2.42 |
| siRNA3-56 | 92.32 | 46.57 | 2.55 |
| siRNA3-57 | 89.75 | 49.08 | 2.16 |
| siRNA3-58 | 80.10 | 38.54 | 1.65 |
| siRNA3-59 | 78.93 | 44.14 | 2.06 |
| siRNA3-60 | 96.84 | 81.97 | 6.07 |
| siRNA3-61 | 100.34 | 91.37 | 22.83 |
| siRNA3-62 | 82.09 | 26.67 | 1.02 |
| siRNA3-63 | 81.17 | 50.84 | 1.75 |
| siRNA3-64 | 74.59 | 27.62 | 7.14 |
| siRNA3-65 | 64.37 | 19.09 | n.a. |
| siRNA3-66 | 57.45 | 16.97 | 1.25 |
| siRNA3-67 | 59.61 | 14.16 | 5.84 |
| siRNA3-68 | 69.18 | 27.72 | 1.61 |
| siRNA3-69 | 75.18 | 25.58 | 1.07 |
| siRNA3-70 | 56.25 | 24.68 | 0.82 |
| siRNA3-71 | 61.12 | 21.48 | 0.82 |
| siRNA3-72 | 80.12 | 20.54 | 1.15 |
| siRNA3-73 | 51.36 | 28.01 | 0.99 |
| siRNA3-74 | 82.11 | 15.48 | 1.09 |
| siRNA3-75 | 68.66 | 12.70 | 0.98 |
| siRNA3-76 | 60.48 | 23.20 | 1.05 |
| siRNA3-77 | 60.83 | 24.64 | 0.65 |
| siRNA3-78 | 64.70 | 32.73 | 0.87 |
| siRNA3-79 | 66.72 | 24.24 | 0.71 |
| siRNA3-80 | 69.82 | 22.97 | 0.79 |
| siRNA3-81 | 95.89 | 82.76 | 13.42 |
| siRNA3-82 | 95.24 | 96.51 | 56.21 |
| siRNA3-83 | 75.06 | 21.68 | 1.36 |
| siRNA3-84 | 101.54 | 93.07 | 10.85 |
| siRNA3-85 | 66.43 | 26.52 | 1.07 |
| siRNA3-86 | 61.78 | 33.37 | 1.17 |
| siRNA3-87 | 64.21 | 28.77 | 0.88 |
| siRNA3-88 | 71.49 | 37.87 | 1.25 |
| siRNA3-89 | 76.73 | 26.15 | 0.86 |
| siRNA3-90 | 83.92 | 33.48 | 1.20 |
| siRNA3-91 | 76.89 | 18.88 | 1.11 |
| siRNA3-92 | 82.54 | 18.30 | 1.05 |
| siRNA3-93 | 83.49 | 43.59 | 3.30 |
| siRNA3-94 | 92.17 | 65.52 | 5.65 |
| siRNA3-95 | 85.03 | 40.40 | 2.09 |
| siRNA3-96 | 90.82 | 47.14 | 2.84 |
| siRNA3-97 | 78.08 | 29.73 | 1.40 |
| siRNA3-98 | 63.49 | 26.65 | 1.04 |
| siRNA3-99 | 64.30 | 29.35 | 1.21 |
| siRNA3-100 | 53.33 | 27.60 | 0.86 |
| siRNA3-101 | 53.29 | 12.84 | 0.78 |
| siRNA3-102 | 69.71 | 17.78 | 0.81 |
| siRNA3-103 | 76.55 | 27.23 | 0.82 |
| siRNA3-104 | 65.21 | 16.85 | 0.73 |
| siRNA3-105 | 62.47 | 16.03 | 0.63 |
| siRNA3-106 | 47.46 | 18.16 | 0.67 |
| siRNA3-107 | 64.19 | 14.49 | 0.90 |
| siRNA3-108 | 67.90 | 19.73 | 0.90 |
| siRNA3-109 | 62.51 | 17.10 | 1.00 |
| siRNA3-110 | 53.26 | 14.21 | 0.89 |
| siRNA3-111 | 71.72 | 16.03 | 1.22 |
| siRNA3-112 | 60.83 | 11.23 | 0.89 |
| siRNA3-113 | 58.10 | 17.63 | 0.78 |
| siRNA3-114 | 67.38 | 16.27 | 1.02 |
| siRNA3-115 | 62.98 | 28.08 | 1.04 |
| siRNA3-116 | 59.52 | 20.01 | 1.07 |
| siRNA3-117 | 58.97 | 16.37 | 0.81 |
| siRNA3-118 | 72.20 | 25.55 | 0.94 |
| siRNA3-119 | 63.43 | 12.18 | 0.69 |
| siRNA3-120 | 70.05 | 19.52 | 0.64 |

*mean value from 6 knock-down studies.
*set to 100%.
***mean value from 3 knock-down studies,
n.a. = not available

[1949] In-Vitro Results

[1950] At the applied concentrations of 0.1, 1.0 and 10.0 nM, the positive control compound siRNA2-1 shows residual expressions of 91.95, 52.40 and 3.20%, respectively while the second positive control siRNA3-1 (=siRNA1-3, example 1) with PS-stabilized 3′-end of the sense strand shows higher in-vitro potencies with 60.47, 20.78 and 0.88% of remaining TTR mRNA. Both compounds, siRNA2-1 and siRNA3-1, showed high in-vivo potencies (see examples 1 and 2). Therefore, in-vitro knock-downs in the range of the two positive control compounds can be regarded as sufficiently potent for promising in-vivo results.

[1951] The here described siRNAs (siRNA3-2 to siRNA3-120) show satisfying knock-down results, a high number of which being in the range of the positive control sequences.

[1952] The compound series siRNA3-2 to siRNA3-22 and siRNA3-60 to siRNA3-80, with one morpholine or dioxane building block in the antisense strand show good to moderate potencies, when the herein described novel nucleotides are placed at the 5′-end of the antisense strand. Modifications at positions 1, 2, 3 and 4 in the morpholine-modified series (siRNA3-2, 3-3, 3-4 and 3-5) and at positions 1 and 2 within the dioxane analogs (siRNA3-60 and 3-61) lead to moderate potencies. Advantageously, all other sequences within these two series show good in-vitro knock-downs, and for some within the range of the positive controls (e.g., siRNA3-8, siRNA3-9, siRNA3-17, siRNA3-70, siRNA3-71 or siRNA3-77).

[1953] The siRNAs with a second modified nucleotide analog in the antisense strand in addition to position 7, siRNA3-23 to siRNA3-41 with morpholine derived nucleotides and siRNA3-81 and siRNA3-100 with the corresponding dioxanes, show also good to moderate in-vitro knock-downs. The best performing compounds from this series are the siRNA3-29, siRNA3-30, siRNA3-32, siRNA3-36, siRNA3-38, siRNA3-39, siRNA3-40 and siRNA3-41, which show high potencies equivalent to the positive control compounds. It seems, that modifications at the 3′-end of the antisense strand in addition to modified position 7 are favored over the opposite 5′-end modification. Very interestingly, in the analogous dioxane series (siRNA3-81 and siRNA3-100), almost all sequences with two dioxane building blocks in the antisense strand show high potencies. Similar to the morpholine series, only modifications at the 5′-end in addition to position 7 (siRNA3-81, siRNA3-82 and siRNA3-84) lead to moderate, but satisfying, knock-down potencies.

[1954] The best potencies were achieved in the third modification series with modifications in the sense strand and at position 7 in the antisense strand. All siRNAs with morpholine derived nucleotides (siRNA3-42 to siRNA3-59) and also with the corresponding dioxane building blocks (siRNA3-101 to siRNA3-120) showed high in-vitro potencies in the range of the two positive control sequences.

[1955] In summary, the results, listed in Table 3d indicate, that the incorporation of the (2R,6R)-configured novel nucleotide building blocks of the morpholine and dioxane series within the hybridizing part of an siRNA-sequence is well tolerated at numerous positions of the oligonucleotide double strand and leads to high in-vitro knock-down potencies.

1. A double-stranded oligonucleotide comprising a sense strand oligonucleotide and an antisense strand oligonucleotide, and wherein the antisense strand oligonucleotide comprises one or more nucleotide analogs of formula (I-A) which are neither the 5′-overhang nor the 3′-overhang of the said antisense strand oligonucleotide, and wherein a nucleotide analog of formula (I-A) is as described below: [chemical structure]
wherein independently for each compound of formula (I-A):
B is a heterocyclic nucleobase;
one of L1 and L2 is an internucleoside linking group linking the compound of formula (I-A) to a nucleotide residue and the other of L1 and L2 is H, a protecting group, a phosphorus moiety or an internucleoside linking group linking the compound of formula (I-A) to a nucleotide residue
Y is O, NH, NR1 or N—C(═O)-R1, wherein R1 is:
a (C1-C20) alkyl group,
optionally substituted by one or more groups selected from an halogen atom, a (C1-C6) alkyl group, a (C3-C8) cycloalkyl group, a (C3-C14) heterocycle, a (C6-C14) aryl group, a (C5-C14) heteroaryl group, —O-Z1, —N(Z1)(Z2), —S-Z1, —CN, —C(=J)-O-Z1, —O-C(=J)-Z1, —C(=J)-N(Z1)(Z2), —N(Z1)-C(=J)-Z2, wherein
J is O or S,
each of Z1 and Z2 is, independently, H, a (C1-C6) alkyl group, optionally substituted by one or more groups selected from a halogen atom and a (C1-C6) alkyl group,
a (C3-C8) cycloalkyl group, optionally substituted by one or more groups selected from a halogen atom and a (C1-C6) alkyl group,
a group —[C(═O)]m-R2-(O—CH₂—CH₂)p-R3, wherein
m is an integer meaning 0 or 1,
p is an integer ranging from 0 to 10,
R2 is a (C1-C20) alkylene group optionally substituted by a (C1-C6) alkyl group, —O-Z3, −N(Z3)(Z4), —S-Z3, —CN, —C(═K)—O-Z3, —O—C(═K)-Z3, —C(═K)—N(Z3)(Z4), and —N(Z3)-C(═K)-Z4, wherein
K is O or S,
each of Z3 and Z4 is, independently, H, a (C1-C6) alkyl group, optionally substituted by one or more groups selected from a halogen atom and a (C1-C6) alkyl group, and
R3 is selected from the group consisting of a hydrogen atom, a (C1-C6) alkyl group, a (C1-C6) alkoxy group, a (C3-C8) cycloalkyl group, a (C3-C14) heterocycle, a (C6-C14) aryl group or a (C5-C14) heteroaryl group,
X1 and X2 are each, independently, a hydrogen atom, a (C1-C6) alkyl group, and
each of Ra, Rb, Rc and Rd is, independently, H or a (C1-C6) alkyl group,
as well as any stereoisomer thereof or any pharmaceutically acceptable salt thereof.

2. The double-stranded oligonucleotide according to claim 1, wherein the antisense strand oligonucleotide comprises from 1 to 10 of the said nucleotide analogs of formula (I-A), preferably from 1 to 5 of the said nucleotide analogs of formula (I-A).

3. The double-stranded oligonucleotide according to any one of claims 1 and 2, wherein the antisense strand oligonucleotide has a nucleotide length ranging from 15 to 30 nucleotides, preferably from 20 to 25 nucleotides, and most preferably from 17 to 25 nucleotides.

4. The double-stranded oligonucleotide according to any one of claims 1 to 3, wherein, in the antisense strand oligonucleotide, the one or more nucleotide analogs of formula (I-A) comprised therein are located successively and/or non-successively, at any location of the said antisense strand oligonucleotide.

5. The double-stranded oligonucleotide according to any one of claims 1 to 4, wherein the antisense strand oligonucleotide comprises a hybridizing region which hybridizes with the sense strand oligonucleotide, and wherein in the antisense strand oligonucleotide, the one or more nucleotide analogs of formula (I-A) comprised therein are located in a nucleotide region of the said antisense oligonucleotide ranging from the nucleotide at position 2 to the nucleotide at position 15 of the said hybridizing region, starting from the 5′-end nucleotide of the antisense strand.

6. The double-stranded oligonucleotide according to any one of claims 1 to 3, wherein the antisense strand oligonucleotide comprises a hybridizing region which hybridizes with the sense strand oligonucleotide, and wherein, in the antisense strand oligonucleotide, the one or more nucleotide analogs of formula (I-A) comprised therein are located in a nucleotide region of the said antisense oligonucleotide ranging from the nucleotide at position 2 to the nucleotide at position 10 of the said hybridizing region, such as from the nucleotide at position 2 to the nucleotide at position 8 of the said hybridizing region, starting from the 5′-end nucleotide of the said antisense strand.

7. The double-stranded oligonucleotide according to any one of claims 1 to 6, wherein the antisense strand oligonucleotide further comprises one or more nucleotide analogs of formula (I-B) below [chemical structure]
wherein, independently for each compound of formula (I-B):
B is a heterocyclic nucleobase;
one of L1 and L2 is an internucleoside linking group linking the compound of formula (I-B) to a nucleotide residue and the other of L1 and L2 is H, a protecting group, a phosphorus moiety or an internucleoside linking group linking the compound of formula (I-B) to a nucleotide residue
Y is NR1 or N—C(═O)-R1, wherein R1 is:
a group —[C(═O)]m-R2-(O—CH₂—CH₂)p-R3, wherein
m is an integer meaning 0 or 1,
p is an integer ranging from 0 to 10,
R2 is a (C1-C20) alkylene group optionally substituted by a (C1-C6) alkyl group, —O-Z3, —N(Z3)(Z4), —S-Z3, —CN, —C(═K)—O-Z3, —O—C(═K)-Z3, —C(═K)-N(Z3)(Z4), and —N(Z3)-C(═K)-Z4, wherein
K is O or S,
each of Z3 and Z4 is, independently, H, a (C1-C6) alkyl group, optionally substituted by one or more groups selected from a halogen atom and a (C1-C6) alkyl group, and
R3 is a cell targeting moiety,
X1 and X2 are each, independently, a hydrogen atom, a (C1-C6) alkyl group, and
each of Ra, Rb, Rc and Rd is, independently, H or a (C1-C6) alkyl group,
as well as any stereoisomer thereof or any pharmaceutically acceptable salt thereof.

8. The double-stranded oligonucleotide according to any one of claims 1 to 7, wherein the antisense strand oligonucleotide comprises one or more nucleotide analogs of formula (I-B) and wherein at least one nucleotide of formula (I-B) consists of the 5′-end or the 3′-end nucleotide.

9. The double-stranded oligonucleotide according to any one of claims 1 to 8 wherein in a nucleotide analog of formula (I-A) and (I-B) comprised in the antisense strand oligonucleotide, Y is NR1, R1 is a non-substituted (C1-C20) alkyl group, and L1, L2, Ra, Rb, Rc, Rd, X1, X2, R2, R3 and B have the same meaning as defined for the general formula (I-A) in claim 1, or any pharmaceutically acceptable salt thereof.

10. The double-stranded oligonucleotide according to any one of claims 1 to 8 wherein in a nucleotide analog of formula (I-A) and (I-B) comprised in the antisense strand oligonucleotide, Y is NR1, R1 is a non-substituted (C1-C16) alkyl group, which includes an alkyl group selected from a group comprising methyl, isopropyl, butyl, octyl, hexadecyl, and L1, L2, Ra, Rb, Rc, Rd, X1, X2, R2, R3 and B have the same meaning as defined in claim 1, or a pharmaceutically acceptable salt thereof.

11. The double-stranded oligonucleotide according to any one of claims 1 to 8 wherein in a nucleotide analog of formula (I-A) and (I-B) comprised in the antisense strand oligonucleotide, Y is NR1, R1 is a (C3-C8) cycloalkyl group, optionally substituted by one or more groups selected from a halogen atom and a (C1-C6) alkyl group, and L1, L2, Ra, Rb, Rc, Rd, X1, X2, R2, R3 and B have the same meaning as defined in claim 1, or a pharmaceutically acceptable salt thereof.

12. The double-stranded oligonucleotide according to any one of claims 1 to 8 wherein in a nucleotide analog of formula (I-A) and (I-B) comprised in the antisense strand oligonucleotide, Y is NR1, R1 is a cyclohexyl group, and L1, L2, Ra, Rb, Rc, Rd, X1, X2, R2, R3 and B have the same meaning have the same meaning as defined in claim 1, or a pharmaceutically acceptable salt thereof.

13. The double-stranded oligonucleotide according to any one of claims 1 to 8 wherein in a nucleotide analog of formula (I-A) and (I-B) comprised in the antisense strand oligonucleotide, Y is NR1, R1 is a (C1-C20) alkyl group substituted by a (C6-C14) aryl group and L1, L2, Ra, Rb, Rc, Rd, X1, X2, R2, R3 and B have the same meaning as defined in claim 1, or a pharmaceutically acceptable salt thereof.

14. The double-stranded oligonucleotide according to any one of claims 1 to 8 wherein in a nucleotide analog of formula (I-A) and (I-B) comprised in the antisense strand oligonucleotide, Y is NR1, R1 is a methyl group substituted by a phenyl group, and L1, L2, Ra, Rb, Rc, Rd, Xl, X2, R2, R3 and B have the same meaning as defined in claim 1, or a pharmaceutically acceptable salt thereof.

15. The double-stranded oligonucleotide according to any one of claims 1 to 8 wherein in a nucleotide analog of formula (I-A) and (I-B) comprised in the antisense strand oligonucleotide, Y is N—C(═O)-R1, R1 is an optionally substituted (C1-C20) alkyl group, and L1, L2, Ra, Rb, Rc, Rd, X1, X2, R2, R3 and B have the same meaning as defined in claim 1, or a pharmaceutically acceptable salt thereof.

16. The double-stranded oligonucleotide according to any one of claims 1 to 8 wherein in a nucleotide analog of formula (I-A) and (I-B) comprised in the antisense strand oligonucleotide, Y is N—C(═O)-R1, R1 is selected from a group comprising methyl and pentadecyl and L1, L2, Ra, Rb, Rc, Rd, X1, X2, R2, R3 and B have the same meaning as defined in claim 1, or a pharmaceutically acceptable salt thereof.

17. The double-stranded oligonucleotide according to any one of claims 1 to 8 wherein in a nucleotide analog of formula (I-A) and (I-B) comprised in the antisense strand oligonucleotide, B is selected from a group comprising a pyrimidine, a substituted pyrimidine, a purine and a substituted purine, or any pharmaceutically acceptable salt thereof.

18. The double-stranded oligonucleotide according to any one of claims 1 to 17, wherein the said one or more nucleotide analogs of formula (I-A) consist of the (2R,6R)-stereoisomer thereof.

19. The double-stranded oligonucleotide according to any one of claims 1 to 18, wherein the sense strand oligonucleotide comprises one or more nucleotide analogs of formula (I-A) as defined in claim 1.

20. The double-stranded oligonucleotide according to claim 19, wherein the sense strand oligonucleotide comprises one or more nucleotide analogs of formula (I-B) as defined in claim 7.

21. The double-stranded oligonucleotide according to claim 20, wherein the sense strand comprises one or more nucleotide analogs of formula (I-B) as defined in claim 7 and wherein at least one nucleotide of formula (I-B) consists of the 5′-end or the 3′-end nucleotide and wherein the said one or more modified nucleotides of formula (I-B) are contiguous.

22. The double-stranded oligonucleotide according to claim 20, wherein the sense strand comprises one to three nucleotide analogs of formula (I-B) as defined in claim 7, which modified nucleotides of formula (I-B) are contiguous and form an oligonucleotide stretch located at the 5′-end or at the 3′-end of the sense strand.

23. The double-stranded oligonucleotide according to any one of claims 1 to 22, which consists of a small interfering RNA (siRNA), or a pharmaceutically acceptable salt thereof.

24. A single-stranded antisense oligonucleotide that is complementary to a target mRNA or to a target (double-stranded) DNA, which is as defined in any one of claims 1 to 18.

25. A composition comprising a double-stranded oligonucleotide as defined in any one of claims 1 to 23 or a single-stranded antisense oligonucleotide as defined in claim 24.

26. A pharmaceutical composition comprising a double-stranded oligonucleotide according to any one of claims 1 to 24.

27. A double-stranded oligonucleotide as defined in any one of claims 1 to 24 for its use as a medicament.

The application's sequence listing, which the Patent Office published only in electronic form, follows.

SEQUENCE LISTING (150 sequences)

SEQ ID NO: 1 - protein, 20 aa, Artificial Sequence
  Peptide
WLSEAGPVVTVRALRGTGSW

SEQ ID NO: 2 - DNA, 225 bp, Artificial Sequence
  dual luciferase reporter-based pmirGLO screening plasmid comprising multiple partial 3’UTR mouse TTR sequence
tgagagactcagcccaggaggaccaggatcttgccaaagcagtagcatcccatttgtaccttttctcactagaacctctataaacttttctcactagaacctctataaacttttctcactagaacctctataaacttttctcactagaacctctataaaccgtgttagcagctcaggaagatgccgtgaagcattcttattaaaccacctgctatttcattcaaa

SEQ ID NO: 3 - RNA, 22 nt, Artificial Sequence
  ss1-0
  variation 1: /note="T in position 1 is a lgT3 analog "
  variation 2: /note="T in position 2 is a lgT3 analog "
  variation 3: /note="T in position 3 is a lgT3 analog "
  variation 4: /note="A in position 4 is a 2'-fluoro-adenosine (fA)"
  variation 5: /note="U in position 5 is a 2'-O-Methyluridine (mU)"
  variation 6: /note="C in position 6 is a 2'-fluoro-cytidine (fC)"
  variation 7: /note="G in position 7 is a 2'-O-Methylguanosine (mG)"
  variation 8: /note="U in position 8 is a 2'- fluoro-uridine (fU)"
  variation 9: /note="A in position 9 is a 2'-O-Methyladenosine (mA)"
  variation 10: /note="C in position 10 is a 2'-fluoro-cytidine (fC)"
  variation 11: /note="G in position 11 is a 2'-O-Methylguanosine (mG)"
  variation 12: /note="U in position 12 is a 2'- fluoro-uridine (fU)"
  variation 13: /note="A in position 13 is a 2'-O-Methyladenosine (mA)"
  variation 14: /note="C in position 14 is a 2'-fluoro-cytidine (fC)"
  variation 15: /note="C in position 15 is a 2'-O-Methylcytidine (mC)"
  variation 16: /note="G in position 16 is a 2'-fluoro-guanosine (fG)"
  variation 17: /note="U in position 17 is a 2'-O-Methyluridine (mU)"
  variation 18: /note="C in position 18 is a 2'-fluoro-cytidine (fC)"
  variation 19: /note="G in position 19 is a 2'-O-Methylguanosine (mG)"
  variation 20: /note="U in position 20 is a 2'- fluoro-uridine (fU)"
  variation 20: /note="the nucleotide in position 20 and the nucleotide in position 21 are linked through a phosphorothiate linkage "
  variation 21: /note="A in position 21 is a 2'-O-Methyladenosine (mA)"
  variation 21: /note="the nucleotide in position 21 and the nucleotide in position 20 are linked through a phosphorothiate "
  variation 21: /note="the nucleotide in position 21 and the nucleotide in position 22 are linked through a phosphorothiate "
  variation 22: /note="U in position 22 is a 2'- fluoro-uridine (fU)"
  variation 22: /note="the nucleotide in position 22 and the nucleotide in position 21 are linked through a phosphorothiate linkage "
tttaucguacguaccgucguau

SEQ ID NO: 4 - RNA, 24 nt, Artificial Sequence
  ss1-1
  variation 1: /note="T in position 1 is a lgT3 analog "
  variation 2: /note="T in position 2 is a lgT3 analog "
  variation 3: /note="T in position 3 is a lgT3 analog "
  variation 4: /note="A in position 4 is a 2'-fluoro-adenosine (fA)"
  variation 5: /note="A in position 5 is a 2'-O-Methyladenosine (mA)"
  variation 6: /note="C in position 6 is a 2'-fluoro-cytidine (fC)"
  variation 7: /note="A in position 7 is a 2'-O-Methyladenosine (mA)"
  variation 8: /note="G in position 8 is a 2'-fluoro-guanosine (fG)"
  variation 9: /note="U in position 9 is a 2'-O-Methyluridine (mU)"
  variation 10: /note="G in position 10 is a 2'-fluoro-guanosine (fG)"
  variation 11: /note="U in position 11 is a 2'-O-Methyluridine (mU)"
  variation 12: /note="U in position 12 is a 2'- fluoro-uridine (fU)"
  variation 13: /note="C in position 13 is a 2'-fluoro-cytidine (fC)"
  variation 14: /note="U in position 14 is a 2'- fluoro-uridine (fU)"
  variation 15: /note="U in position 15 is a 2'-O-Methyluridine (mU)"
  variation 16: /note="G in position 16 is a 2'-fluoro-guanosine (fG)"
  variation 17: /note="C in position 17 is a 2'-O-Methylcytidine (mC)"
  variation 18: /note="U in position 18 is a 2'- fluoro-uridine (fU)"
  variation 19: /note="C in position 19 is a 2'-O-Methylcytidine (mC)"
  variation 20: /note="U in position 20 is a 2'- fluoro-uridine (fU)"
  variation 21: /note="A in position 21 is a 2'-O-Methyladenosine (mA)"
  variation 22: /note="U in position 22 is a 2'- fluoro-uridine (fU)"
  variation 22: /note="the nucleotide in position 22 and the nucleotide in position 23 are linked through a phosphorothiate linkage "
  variation 23: /note="A in position 23 is a 2'-O-Methyladenosine (mA)"
  variation 23: /note="the nucleotide in position 23 and the nucleotide in position 22 are linked through a phosphorothiate linkage "
  variation 23: /note="the nucleotide in position 23 and the nucleotide in position 24 are linked through a phosphorothiate linkage "
  variation 24: /note="A in position 24 is a 2'-fluoro-adenosine (fA)"
  variation 24: /note="the nucleotide in position 24 and the nucleotide in position 23 are linked through a phosphorothiate linkage "
tttaacaguguucuugcucuauaa

SEQ ID NO: 5 - RNA, 24 nt, Artificial Sequence
  ss1-2
  variation 1: /note="A in position 1 is a 2'-fluoro-adenosine (fA)"
  variation 1: /note="the nucleotide in position 1 and the nucleotide in position 2 are linked through a phosphorothiate linkage "
  variation 2: /note="A in position 2 is a 2'-O-Methyladenosine (mA)"
  variation 2: /note="the nucleotide in position 2 and the nucleotide in position 1 are linked through a phosphorothiate "
  variation 2: /note="the nucleotide in position 2 and the nucleotide in position 3 are linked through a phosphorothiate "
  variation 3: /note="C in position 3 is a 2'-fluoro-cytidine (fC)"
  variation 3: /note="the nucleotide in position 3 and the nucleotide in position 2 are linked through a phosphorothiate linkage "
  variation 4: /note="A in position 4 is a 2'-O-Methyladenosine (mA)"
  variation 5: /note="G in position 5 is a 2'-fluoro-guanosine (fG)"
  variation 6: /note="U in position 6 is a 2'-O-Methyluridine (mU)"
  variation 7: /note="G in position 7 is a 2'-fluoro-guanosine (fG)"
  variation 8: /note="U in position 8 is a 2'-O-Methyluridine (mU)"
  variation 9: /note="U in position 9 is a 2'- fluoro-uridine (fU)"
  variation 10: /note="C in position 10 is a 2'-fluoro-cytidine (fC)"
  variation 11: /note="U in position 11 is a 2'- fluoro-uridine (fU)"
  variation 12: /note="U in position 12 is a 2'-O-Methyluridine (mU)"
  variation 13: /note="G in position 13 is a 2'-fluoro-guanosine (fG)"
  variation 14: /note="C in position 14 is a 2'-O-Methylcytidine (mC)"
  variation 15: /note="U in position 15 is a 2'- fluoro-uridine (fU)"
  variation 16: /note="C in position 16 is a 2'-O-Methylcytidine (mC)"
  variation 17: /note="U in position 17 is a 2'- fluoro-uridine (fU)"
  variation 18: /note="A in position 18 is a 2'-O-Methyladenosine (mA)"
  variation 19: /note="U in position 19 is a 2'- fluoro-uridine (fU)"
  variation 20: /note="A in position 20 is a 2'-O-Methyladenosine (mA)"
  variation 21: /note="A in position 21 is a 2'-fluoro-adenosine (fA)"
  variation 22: /note="T in position 22 is a lgT7 analog"
  variation 23: /note="T in position 23 is a lgT7 analog"
  variation 24: /note="T in position 24 is a lgT7 analog"
aacaguguucuugcucuauaattt

SEQ ID NO: 6 - RNA, 24 nt, Artificial Sequence
  ss1-3
  variation 1: /note="T in position 1 is a lgT7 analog"
  variation 2: /note="T in position 2 is a lgT7 analog"
  variation 3: /note="T in position 3 is a lgT7 analog"
  variation 4: /note="A in position 4 is a 2'-fluoro-adenosine (fA)"
  variation 5: /note="A in position 5 is a 2'-O-Methyladenosine (mA)"
  variation 6: /note="C in position 6 is a 2'-fluoro-cytidine (fC)"
  variation 7: /note="A in position 7 is a 2'-O-Methyladenosine (mA)"
  variation 8: /note="G in position 8 is a 2'-fluoro-guanosine (fG)"
  variation 9: /note="U in position 9 is a 2'-O-Methyluridine (mU)"
  variation 10: /note="G in position 10 is a 2'-fluoro-guanosine (fG)"
  variation 11: /note="U in position 11 is a 2'-O-Methyluridine (mU)"
  variation 12: /note="U in position 12 is a 2'- fluoro-uridine (fU)"
  variation 13: /note="C in position 13 is a 2'-fluoro-cytidine (fC)"
  variation 14: /note="U in position 14 is a 2'- fluoro-uridine (fU)"
  variation 15: /note="U in position 15 is a 2'-O-Methyluridine (mU)"
  variation 16: /note="G in position 16 is a 2'-fluoro-guanosine (fG)"
  variation 17: /note="C in position 17 is a 2'-O-Methylcytidine (mC)"
  variation 18: /note="U in position 18 is a 2'- fluoro-uridine (fU)"
  variation 19: /note="C in position 19 is a 2'-O-Methylcytidine (mC)"
  variation 20: /note="U in position 20 is a 2'- fluoro-uridine (fU)"
  variation 21: /note="A in position 21 is a 2'-O-Methyladenosine (mA)"
  variation 22: /note="U in position 22 is a 2'- fluoro-uridine (fU)"
  variation 22: /note="the nucleotide in position 22 and the nucleotide in position 23 are linked through a phosphorothiate linkage "
  variation 23: /note="A in position 23 is a 2'-O-Methyladenosine (mA)"
  variation 23: /note="the nucleotide in position 23 and the nucleotide in position 22 are linked through a phosphorothiate linkage "
  variation 23: /note="the nucleotide in position 23 and the nucleotide in position 24 are linked through a phosphorothiate linkage "
  variation 24: /note="A in position 24 is a 2'-fluoro-adenosine (fA)"
  variation 24: /note="the nucleotide in position 24 and the nucleotide in position 23 are linked through a phosphorothiate linkage "
tttaacaguguucuugcucuauaa

SEQ ID NO: 7 - RNA, 26 nt, Artificial Sequence
  ss1-4
  variation 1: /note="T in position 1 is a lgT3 analog "
  variation 2: /note="T in position 2 is a lgT3 analog "
  variation 3: /note="T in position 3 is a lgT3 analog "
  variation 4: /note="A in position 4 is a 2'-fluoro-adenosine (fA)"
  variation 5: /note="U in position 5 is a 2'-O-Methyluridine (mU)"
  variation 6: /note="C in position 6 is a 2'-fluoro-cytidine (fC)"
  variation 7: /note="G in position 7 is a 2'-O-Methylguanosine (mG)"
  variation 8: /note="U in position 8 is a 2'- fluoro-uridine (fU)"
  variation 9: /note="A in position 9 is a 2'-O-Methyladenosine (mA)"
  variation 10: /note="C in position 10 is a 2'-fluoro-cytidine (fC)"
  variation 11: /note="G in position 11 is a 2'-O-Methylguanosine (mG)"
  variation 12: /note="U in position 12 is a 2'- fluoro-uridine (fU)"
  variation 13: /note="A in position 13 is a 2'-O-Methyladenosine (mA)"
  variation 14: /note="C in position 14 is a 2'-fluoro-cytidine (fC)"
  variation 15: /note="C in position 15 is a 2'-O-Methylcytidine (mC)"
  variation 16: /note="G in position 16 is a 2'-fluoro-guanosine (fG)"
  variation 17: /note="U in position 17 is a 2'-O-Methyluridine (mU)"
  variation 18: /note="C in position 18 is a 2'-fluoro-cytidine (fC)"
  variation 19: /note="G in position 19 is a 2'-O-Methylguanosine (mG)"
  variation 20: /note="U in position 20 is a 2'- fluoro-uridine (fU)"
  variation 21: /note="A in position 21 is a 2'-O-Methyladenosine (mA)"
  variation 22: /note="U in position 22 is a 2'- fluoro-uridine (fU)"
  variation 23: /note="A in position 23 is a 2'-O-Methyladenosine (mA)"
  variation 24: /note="A in position 24 is a 2'-fluoro-adenosine (fA)"
  variation 25: /note="T in position 25 is a lT4a analog"
  variation 26: /note="T in position 26 is a lT4a analog"
tttaucguacguaccgucguauaatt

SEQ ID NO: 8 - RNA, 21 nt, Artificial Sequence
  as1-0
  variation 1: /note="A in position 1 is a 2'-fluoro-adenosine (fA)"
  variation 1: /note="the nucleotide in position 1 and the nucleotide in position 2 are linked through a phosphorothiate "
  variation 2: /note="U in position 2 is a 2'- fluoro-uridine (fU)"
  variation 2: /note="the nucleotide in position 2 and the nucleotide in position 1 are linked through a phosphorothiate linkage "
  variation 2: /note="the nucleotide in position 2 and the nucleotide in position 3 are linked through a phosphorothiate linkage "
  variation 3: /note="A in position 3 is a 2'-O-Methyladenosine (mA)"
  variation 3: /note="the nucleotide in position 3 and the nucleotide in position 2 are linked through a phosphorothiate linkage "
  variation 4: /note="C in position 4 is a 2'-fluoro-cytidine (fC)"
  variation 5: /note="G in position 5 is a 2'-O-Methylguanosine (mG)"
  variation 6: /note="A in position 6 is a 2'-fluoro-adenosine (fA)"
  variation 7: /note="C in position 7 is a 2'-O-Methylcytidine (mC)"
  variation 8: /note="G in position 8 is a 2'-fluoro-guanosine (fG)"
  variation 9: /note="G in position 9 is a 2'-O-Methylguanosine (mG)"
  variation 10: /note="U in position 10 is a 2'- fluoro-uridine (fU)"
  variation 11: /note="A in position 11 is a 2'-O-Methyladenosine (mA)"
  variation 12: /note="C in position 12 is a 2'-fluoro-cytidine (fC)"
  variation 13: /note="G in position 13 is a 2'-O-Methylguanosine (mG)"
  variation 14: /note="U in position 14 is a 2'- fluoro-uridine (fU)"
  variation 15: /note="A in position 15 is a 2'-O-Methyladenosine (mA)"
  variation 16: /note="C in position 16 is a 2'-fluoro-cytidine (fC)"
  variation 17: /note="G in position 17 is a 2'-O-Methylguanosine (mG)"
  variation 18: /note="A in position 18 is a 2'-fluoro-adenosine (fA)"
  variation 19: /note="U in position 19 is a 2'-O-Methyluridine (mU)"
  variation 19: /note="the nucleotide in position 19 and the nucleotide in position 20 are linked through a phosphorothiate linkage "
  variation 20: /note="the nucleotide in position 20 is a DNA thymine"
  variation 20: /note="the nucleotide in position 20 and the nucleotide in position 19 are linked through a phosphorothiate linkage "
  variation 20: /note="the nucleotide in position 20 and the nucleotide in position 21 are linked through a phosphorothiate linkage "
  variation 21: /note="the nucleotide in position 21 is a DNA thymine"
  variation 21: /note="the nucleotide in position 21 and the nucleotide in position 20 are linked through a phosphorothiate linkage "
auacgacgguacguacgautt

SEQ ID NO: 9 - RNA, 23 nt, Artificial Sequence
  as1-1
  variation 1: /note="U in position 1 is a 2'-O-Methyluridine (mU)"
  variation 1: /note="the nucleotide in position 1 and the nucleotide in position 2 are linked through a phosphorothiate linkage "
  variation 2: /note="U in position 2 is a 2'- fluoro-uridine (fU)"
  variation 2: /note="the nucleotide in position 2 and the nucleotide in position 1 are linked through a phosphorothiate linkage "
  variation 2: /note="the nucleotide in position 2 and the nucleotide in position 3 are linked through a phosphorothiate linkage "
  variation 3: /note="A in position 3 is a 2'-O-Methyladenosine (mA)"
  variation 3: /note="the nucleotide in position 3 and the nucleotide in position 2 are linked through a phosphorothiate linkage "
  variation 4: /note="U in position 4 is a 2'- fluoro-uridine (fU)"
  variation 5: /note="A in position 5 is a 2'-O-Methyladenosine (mA)"
  variation 6: /note="G in position 6 is a 2'-fluoro-guanosine (fG)"
  variation 7: /note="A in position 7 is a 2'-O-Methyladenosine (mA)"
  variation 8: /note="G in position 8 is a 2'-fluoro-guanosine (fG)"
  variation 9: /note="C in position 9 is a 2'-O-Methylcytidine (mC)"
  variation 10: /note="A in position 10 is a 2'-fluoro-adenosine (fA)"
  variation 11: /note="A in position 11 is a 2'-O-Methyladenosine (mA)"
  variation 12: /note="G in position 12 is a 2'-O-Methylguanosine (mG)"
  variation 13: /note="A in position 13 is a 2'-O-Methyladenosine (mA)"
  variation 14: /note="A in position 14 is a 2'-fluoro-adenosine (fA)"
  variation 15: /note="C in position 15 is a 2'-O-Methylcytidine (mC)"
  variation 16: /note="A in position 16 is a 2'-fluoro-adenosine (fA)"
  variation 17: /note="C in position 17 is a 2'-O-Methylcytidine (mC)"
  variation 18: /note="U in position 18 is a 2'- fluoro-uridine (fU)"
  variation 19: /note="G in position 19 is a 2'-O-Methylguanosine (mG)"
  variation 20: /note="U in position 20 is a 2'- fluoro-uridine (fU)"
  variation 21: /note="U in position 21 is a 2'-O-Methyluridine (mU)"
  variation 21: /note="the nucleotide in position 21 and the nucleotide in position 22 are linked through a phosphorothiate linkage "
  variation 22: /note="U in position 22 is a 2'-O-Methyluridine (mU)"
  variation 22: /note="the nucleotide in position 22 and the nucleotide in position 21 are linked through a phosphorothiate linkage "
  variation 22: /note="the nucleotide in position 22 and the nucleotide in position 23 are linked through a phosphorothiate linkage "
  variation 23: /note="U in position 23 is a 2'-O-Methyluridine (mU)"
  variation 23: /note="the nucleotide in position 23 and the nucleotide in position 22 are linked through a phosphorothiate linkage "
uuauagagcaagaacacuguuuu

SEQ ID NO: 10 - RNA, 22 nt, Artificial Sequence
  ss1-0
  variation 1: /note="T in position 1 is a lgT3 analog "
  variation 2: /note="T in position 2 is a lgT3 analog "
  variation 3: /note="T in position 3 is a lgT3 analog "
  variation 4: /note="A in position 4 is a 2'-fluoro-adenosine (fA)"
  variation 5: /note="U in position 5 is a 2'-O-Methyluridine (mU)"
  variation 6: /note="C in position 6 is a 2'-fluoro-cytidine (fC)"
  variation 7: /note="G in position 7 is a 2'-O-Methylguanosine (mG)"
  variation 8: /note="U in position 8 is a 2'- fluoro-uridine (fU)"
  variation 9: /note="A in position 9 is a 2'-O-Methyladenosine (mA)"
  variation 10: /note="C in position 10 is a 2'-fluoro-cytidine (fC)"
  variation 11: /note="G in position 11 is a 2'-O-Methylguanosine (mG)"
  variation 12: /note="U in position 12 is a 2'- fluoro-uridine (fU)"
  variation 13: /note="A in position 13 is a 2'-O-Methyladenosine (mA)"
  variation 14: /note="C in position 14 is a 2'-fluoro-cytidine (fC)"
  variation 15: /note="C in position 15 is a 2'-O-Methylcytidine (mC)"
  variation 16: /note="G in position 16 is a 2'-fluoro-guanosine (fG)"
  variation 17: /note="U in position 17 is a 2'-O-Methyluridine (mU)"
  variation 18: /note="C in position 18 is a 2'-fluoro-cytidine (fC)"
  variation 19: /note="G in position 19 is a 2'-O-Methylguanosine (mG)"
  variation 20: /note="U in position 20 is a 2'- fluoro-uridine (fU)"
  variation 20: /note="the nucleotide in position 20 and the nucleotide in position 21 are linked through a phosphorothiate linkage "
  variation 21: /note="A in position 21 is a 2'-O-Methyladenosine (mA)"
  variation 21: /note="the nucleotide in position 21 and the nucleotide in position 20 are linked through a phosphorothiate linkage "
  variation 21: /note="the nucleotide in position 21 and the nucleotide in position 22 are linked through a phosphorothiate linkage "
  variation 22: /note="U in position 22 is a 2'- fluoro-uridine (fU)"
  variation 22: /note="the nucleotide in position 22 and the nucleotide in position 21 are linked through a phosphorothiate "
tttaucguacguaccgucguau

SEQ ID NO: 11 - RNA, 26 nt, Artificial Sequence
  ss2-1
  variation 1: /note="T in position 1 is a lgT7 analog"
  variation 2: /note="T in position 2 is a lgT7 analog"
  variation 3: /note="T in position 3 is a lgT7 analog"
  variation 4: /note="A in position 4 is a 2'-fluoro-adenosine (fA)"
  variation 5: /note="A in position 5 is a 2'-O-Methyladenosine (mA)"
  variation 6: /note="C in position 6 is a 2'-fluoro-cytidine (fC)"
  variation 7: /note="A in position 7 is a 2'-O-Methyladenosine (mA)"
  variation 8: /note="G in position 8 is a 2'-fluoro-guanosine (fG)"
  variation 9: /note="U in position 9 is a 2'-O-Methyluridine (mU)"
  variation 10: /note="G in position 10 is a 2'-fluoro-guanosine (fG)"
  variation 11: /note="U in position 11 is a 2'-O-Methyluridine (mU)"
  variation 12: /note="U in position 12 is a 2'- fluoro-uridine (fU)"
  variation 13: /note="C in position 13 is a 2'-fluoro-cytidine (fC)"
  variation 14: /note="U in position 14 is a 2'- fluoro-uridine (fU)"
  variation 15: /note="U in position 15 is a 2'-O-Methyluridine (mU)"
  variation 16: /note="G in position 16 is a 2'-fluoro-guanosine (fG)"
  variation 17: /note="C in position 17 is a 2'-O-Methylcytidine (mC)"
  variation 18: /note="U in position 18 is a 2'- fluoro-uridine (fU)"
  variation 19: /note="C in position 19 is a 2'-O-Methylcytidine (mC)"
  variation 20: /note="U in position 20 is a 2'- fluoro-uridine (fU)"
  variation 21: /note="A in position 21 is a 2'-O-Methyladenosine (mA)"
  variation 22: /note="U in position 22 is a 2'- fluoro-uridine (fU)"
  variation 23: /note="A in position 23 is a 2'-O-Methyladenosine (mA)"
  variation 24: /note="A in position 24 is a 2'-fluoro-adenosine (fA)"
  variation 25: /note="T in position 25 is a lT4a analog"
  variation 26: /note="T in position 26 is a lT4a analog"
tttaacaguguucuugcucuauaatt

SEQ ID NO: 12 - RNA, 21 nt, Artificial Sequence
  as1-0
  variation 1: /note="A in position 1 is a 2'-fluoro-adenosine (fA)"
  variation 1: /note="the nucleotide in position 1 and the nucleotide in position 2 are linked through a phosphorothiate linkage "
  variation 2: /note="U in position 2 is a 2'- fluoro-uridine (fU)"
  variation 2: /note="the nucleotide in position 2 and the nucleotide in position 1 are linked through a phosphorothiate "
  variation 2: /note="the nucleotide in position 2 and the nucleotide in position 3 are linked through a phosphorothiate "
  variation 3: /note="A in position 3 is a 2'-O-Methyladenosine (mA)"
  variation 3: /note="the nucleotide in position 3 and the nucleotide in position 2 are linked through a phosphorothiate "
  variation 4: /note="C in position 4 is a 2'-fluoro-cytidine (fC)"
  variation 5: /note="G in position 5 is a 2'-O-Methylguanosine (mG)"
  variation 6: /note="A in position 6 is a 2'-fluoro-adenosine (fA)"
  variation 7: /note="C in position 7 is a 2'-O-Methylcytidine (mC)"
  variation 8: /note="G in position 8 is a 2'-fluoro-guanosine (fG)"
  variation 9: /note="G in position 9 is a 2'-O-Methylguanosine (mG)"
  variation 10: /note="U in position 10 is a 2'- fluoro-uridine (fU)"
  variation 11: /note="A in position 11 is a 2'-O-Methyladenosine (mA)"
  variation 12: /note="C in position 12 is a 2'-fluoro-cytidine (fC)"
  variation 13: /note="G in position 13 is a 2'-O-Methylguanosine (mG)"
  variation 14: /note="U in position 14 is a 2'- fluoro-uridine (fU)"
  variation 15: /note="A in position 15 is a 2'-O-Methyladenosine (mA)"
  variation 16: /note="C in position 16 is a 2'-fluoro-cytidine (fC)"
  variation 17: /note="G in position 17 is a 2'-O-Methylguanosine (mG)"
  variation 18: /note="A in position 18 is a 2'-fluoro-adenosine (fA)"
  variation 19: /note="U in position 19 is a 2'-O-Methyluridine (mU)"
  variation 19: /note="the nucleotide in position 19 and the nucleotide in position 20 are linked through a phosphorothiate linkage "
  variation 20: /note="the nucleotide in position 20 is a DNA thymine"
  variation 20: /note="the nucleotide in position 20 and the nucleotide in position 19 are linked through a phosphorothiate linkage "
  variation 20: /note="the nucleotide in position 20 and the nucleotide in position 21 are linked through a phosphorothiate linkage "
  variation 21: /note="the nucleotide in position 21 is a DNA thymine"
  variation 21: /note="the nucleotide in position 21 and the nucleotide in position 20 are linked through a phosphorothiate linkage "
auacgacgguacguacgautt

SEQ ID NO: 13 - RNA, 23 nt, Artificial Sequence
  as2-1
  variation 1: /note="U in position 1 is a 2'-O-Methyluridine (mU)"
  variation 1: /note="the nucleotide in position 1 and the nucleotide in position 2 are linked through a phosphorothiate linkage "
  variation 2: /note="U in position 2 is a 2'- fluoro-uridine (fU)"
  variation 2: /note="the nucleotide in position 2 and the nucleotide in position 1 are linked through a phosphorothiate "
  variation 2: /note="the nucleotide in position 2 and the nucleotide in position 3 are linked through a phosphorothiate "
  variation 3: /note="A in position 3 is a 2'-O-Methyladenosine (mA)"
  variation 3: /note="the nucleotide in position 3 and the nucleotide in position 2 are linked through a phosphorothiate linkage "
  variation 4: /note="U in position 4 is a 2'- fluoro-uridine (fU)"
  variation 5: /note="A in position 5 is a 2'-O-Methyladenosine (mA)"
  variation 6: /note="G in position 6 is a 2'-fluoro-guanosine (fG)"
  variation 7: /note="A in position 7 is a 2'-O-Methyladenosine (mA)"
  variation 8: /note="G in position 8 is a 2'-fluoro-guanosine (fG)"
  variation 9: /note="C in position 9 is a 2'-O-Methylcytidine (mC)"
  variation 10: /note="A in position 10 is a 2'-fluoro-adenosine (fA)"
  variation 11: /note="A in position 11 is a 2'-O-Methyladenosine (mA)"
  variation 12: /note="G in position 12 is a 2'-O-Methylguanosine (mG)"
  variation 13: /note="A in position 13 is a 2'-O-Methyladenosine (mA)"
  variation 14: /note="A in position 14 is a 2'-fluoro-adenosine (fA)"
  variation 15: /note="C in position 15 is a 2'-O-Methylcytidine (mC)"
  variation 16: /note="A in position 16 is a 2'-fluoro-adenosine (fA)"
  variation 17: /note="C in position 17 is a 2'-O-Methylcytidine (mC)"
  variation 18: /note="U in position 18 is a 2'- fluoro-uridine (fU)"
  variation 19: /note="G in position 19 is a 2'-O-Methylguanosine (mG)"
  variation 20: /note="U in position 20 is a 2'- fluoro-uridine (fU)"
  variation 21: /note="U in position 21 is a 2'-O-Methyluridine (mU)"
  variation 21: /note="the nucleotide in position 21 and the nucleotide in position 22 are linked through a phosphorothiate linkage "
  variation 22: /note="U in position 22 is a 2'-O-Methyluridine (mU)"
  variation 22: /note="the nucleotide in position 22 and the nucleotide in position 21 are linked through a phosphorothiate linkage "
  variation 22: /note="the nucleotide in position 22 and the nucleotide in position 23 are linked through a phosphorothiate linkage "
  variation 23: /note="U in position 23 is a 2'-O-Methyluridine (mU)"
  variation 23: /note="the nucleotide in position 23 and the nucleotide in position 22 are linked through a phosphorothiate linkage "
uuauagagcaagaacacuguuuu

SEQ ID NO: 14 - RNA, 23 nt, Artificial Sequence
  as2-2
  variation 1: /note="U in position 1 is a 2'-O-Methyluridine (mU)"
  variation 1: /note="the nucleotide in position 1 and the nucleotide in position 2 are linked through a phosphorothiate linkage "
  variation 2: /note="T in position 2 is a lT4a analog"
  variation 2: /note="the nucleotide in position 2 and the nucleotide in position 1 are linked through a phosphorothiate linkage "
  variation 2: /note="the nucleotide in position 2 and the nucleotide in position 3 are linked through a phosphorothiate linkage "
  variation 3: /note="A in position 3 is a 2'-O-Methyladenosine (mA)"
  variation 3: /note="the nucleotide in position 3 and the nucleotide in position 2 are linked through a phosphorothiate linkage "
  variation 4: /note="U in position 4 is a 2'- fluoro-uridine (fU)"
  variation 5: /note="A in position 5 is a 2'-O-Methyladenosine (mA)"
  variation 6: /note="G in position 6 is a 2'-fluoro-guanosine (fG)"
  variation 7: /note="A in position 7 is a 2'-O-Methyladenosine (mA)"
  variation 8: /note="G in position 8 is a 2'-fluoro-guanosine (fG)"
  variation 9: /note="C in position 9 is a 2'-O-Methylcytidine (mC)"
  variation 10: /note="A in position 10 is a 2'-fluoro-adenosine (fA)"
  variation 11: /note="A in position 11 is a 2'-O-Methyladenosine (mA)"
  variation 12: /note="G in position 12 is a 2'-O-Methylguanosine (mG)"
  variation 13: /note="A in position 13 is a 2'-O-Methyladenosine (mA)"
  variation 14: /note="A in position 14 is a 2'-fluoro-adenosine (fA)"
  variation 15: /note="C in position 15 is a 2'-O-Methylcytidine (mC)"
  variation 16: /note="A in position 16 is a 2'-fluoro-adenosine (fA)"
  variation 17: /note="C in position 17 is a 2'-O-Methylcytidine (mC)"
  variation 18: /note="U in position 18 is a 2'- fluoro-uridine (fU)"
  variation 19: /note="G in position 19 is a 2'-O-Methylguanosine (mG)"
  variation 20: /note="U in position 20 is a 2'- fluoro-uridine (fU)"
  variation 21: /note="U in position 21 is a 2'-O-Methyluridine (mU)"
  variation 21: /note="the nucleotide in position 21 and the nucleotide in position 22 are linked through a phosphorothiate linkage "
  variation 22: /note="U in position 22 is a 2'-O-Methyluridine (mU)"
  variation 22: /note="the nucleotide in position 22 and the nucleotide in position 21 are linked through a phosphorothiate linkage "
  variation 22: /note="the nucleotide in position 22 and the nucleotide in position 23 are linked through a phosphorothiate linkage "
  variation 23: /note="U in position 23 is a 2'-O-Methyluridine (mU)"
  variation 23: /note="the nucleotide in position 23 and the nucleotide in position 22 are linked through a phosphorothiate linkage "
utauagagcaagaacacuguuuu

SEQ ID NO: 15 - RNA, 23 nt, Artificial Sequence
  as2-3
  variation 1: /note="U in position 1 is a 2'-O-Methyluridine (mU)"
  variation 2: /note="T in position 2 is a lT4a analog"
  variation 3: /note="A in position 3 is a 2'-O-Methyladenosine (mA)"
  variation 4: /note="U in position 4 is a 2'- fluoro-uridine (fU)"
  variation 5: /note="A in position 5 is a 2'-O-Methyladenosine (mA)"
  variation 6: /note="G in position 6 is a 2'-fluoro-guanosine (fG)"
  variation 7: /note="A in position 7 is a 2'-O-Methyladenosine (mA)"
  variation 8: /note="G in position 8 is a 2'-fluoro-guanosine (fG)"
  variation 9: /note="C in position 9 is a 2'-O-Methylcytidine (mC)"
  variation 10: /note="A in position 10 is a 2'-fluoro-adenosine (fA)"
  variation 11: /note="A in position 11 is a 2'-O-Methyladenosine (mA)"
  variation 12: /note="G in position 12 is a 2'-O-Methylguanosine (mG)"
  variation 13: /note="A in position 13 is a 2'-O-Methyladenosine (mA)"
  variation 14: /note="A in position 14 is a 2'-fluoro-adenosine (fA)"
  variation 15: /note="C in position 15 is a 2'-O-Methylcytidine (mC)"
  variation 16: /note="A in position 16 is a 2'-fluoro-adenosine (fA)"
  variation 17: /note="C in position 17 is a 2'-O-Methylcytidine (mC)"
  variation 18: /note="U in position 18 is a 2'- fluoro-uridine (fU)"
  variation 19: /note="G in position 19 is a 2'-O-Methylguanosine (mG)"
  variation 20: /note="U in position 20 is a 2'- fluoro-uridine (fU)"
  variation 21: /note="U in position 21 is a 2'-O-Methyluridine (mU)"
  variation 21: /note="the nucleotide in position 21 and the nucleotide in position 22 are linked through a phosphorothiate linkage "
  variation 22: /note="U in position 22 is a 2'-O-Methyluridine (mU)"
  variation 22: /note="the nucleotide in position 22 and the nucleotide in position 21 are linked through a phosphorothiate linkage "
  variation 22: /note="the nucleotide in position 22 and the nucleotide in position 23 are linked through a phosphorothiate linkage "
  variation 23: /note="U in position 23 is a 2'-O-Methyluridine (mU)"
  variation 23: /note="the nucleotide in position 23 and the nucleotide in position 22 are linked through a phosphorothiate linkage "
utauagagcaagaacacuguuuu

SEQ ID NO: 16 - RNA, 23 nt, Artificial Sequence
  as2-4
  variation 1: /note="U in position 1 is a 2'-O-Methyluridine (mU)"
  variation 1: /note="the nucleotide in position 1 and the nucleotide in position 2 are linked through a phosphorothiate linkage "
  variation 2: /note="U in position 2 is a 2'- fluoro-uridine (fU)"
  variation 2: /note="the nucleotide in position 2 and the nucleotide in position 1 are linked through a phosphorothiate "
  variation 2: /note="the nucleotide in position 2 and the nucleotide in position 3 are linked through a phosphorothiate "
  variation 3: /note="A in position 3 is a lA4a analog"
  variation 3: /note="the nucleotide in position 3 and the nucleotide in position 2 are linked through a phosphorothiate linkage "
  variation 4: /note="U in position 4 is a 2'- fluoro-uridine (fU)"
  variation 5: /note="A in position 5 is a 2'-O-Methyladenosine (mA)"
  variation 6: /note="G in position 6 is a 2'-fluoro-guanosine (fG)"
  variation 7: /note="A in position 7 is a 2'-O-Methyladenosine (mA)"
  variation 8: /note="G in position 8 is a 2'-fluoro-guanosine (fG)"
  variation 9: /note="C in position 9 is a 2'-O-Methylcytidine (mC)"
  variation 10: /note="A in position 10 is a 2'-fluoro-adenosine (fA)"
  variation 11: /note="A in position 11 is a 2'-O-Methyladenosine (mA)"
  variation 12: /note="G in position 12 is a 2'-O-Methylguanosine (mG)"
  variation 13: /note="A in position 13 is a 2'-O-Methyladenosine (mA)"
  variation 14: /note="A in position 14 is a 2'-fluoro-adenosine (fA)"
  variation 15: /note="C in position 15 is a 2'-O-Methylcytidine (mC)"
  variation 16: /note="A in position 16 is a 2'-fluoro-adenosine (fA)"
  variation 17: /note="C in position 17 is a 2'-O-Methylcytidine (mC)"
  variation 18: /note="U in position 18 is a 2'- fluoro-uridine (fU)"
  variation 19: /note="G in position 19 is a 2'-O-Methylguanosine (mG)"
  variation 20: /note="U in position 20 is a 2'- fluoro-uridine (fU)"
  variation 21: /note="U in position 21 is a 2'-O-Methyluridine (mU)"
  variation 21: /note="the nucleotide in position 21 and the nucleotide in position 22 are linked through a phosphorothiate linkage "
  variation 22: /note="U in position 22 is a 2'-O-Methyluridine (mU)"
  variation 22: /note="the nucleotide in position 22 and the nucleotide in position 21 are linked through a phosphorothiate linkage "
  variation 22: /note="the nucleotide in position 22 and the nucleotide in position 23 are linked through a phosphorothiate linkage "
  variation 23: /note="U in position 23 is a 2'-O-Methyluridine (mU)"
  variation 23: /note="the nucleotide in position 23 and the nucleotide in position 22 are linked through a phosphorothiate linkage "
uuauagagcaagaacacuguuuu

SEQ ID NO: 17 - RNA, 23 nt, Artificial Sequence
  as2-5
  variation 1: /note="U in position 1 is a 2'-O-Methyluridine (mU)"
  variation 1: /note="the nucleotide in position 1 and the nucleotide in position 2 are linked through a phosphorothiate linkage "
  variation 2: /note="U in position 2 is a 2'- fluoro-uridine (fU)"
  variation 2: /note="the nucleotide in position 2 and the nucleotide in position 1 are linked through a phosphorothiate linkage "
  variation 2: /note="the nucleotide in position 2 and the nucleotide in position 3 are linked through a phosphorothiate linkage "
  variation 3: /note="A in position 3 is a 2'-O-Methyladenosine (mA)"
  variation 3: /note="the nucleotide in position 3 and the nucleotide in position 2 are linked through a phosphorothiate linkage "
  variation 4: /note="T in position 4 is a lT4a analog"
  variation 5: /note="A in position 5 is a 2'-O-Methyladenosine (mA)"
  variation 6: /note="G in position 6 is a 2'-fluoro-guanosine (fG)"
  variation 7: /note="A in position 7 is a 2'-O-Methyladenosine (mA)"
  variation 8: /note="G in position 8 is a 2'-fluoro-guanosine (fG)"
  variation 9: /note="C in position 9 is a 2'-O-Methylcytidine (mC)"
  variation 10: /note="A in position 10 is a 2'-fluoro-adenosine (fA)"
  variation 11: /note="A in position 11 is a 2'-O-Methyladenosine (mA)"
  variation 12: /note="G in position 12 is a 2'-O-Methylguanosine (mG)"
  variation 13: /note="A in position 13 is a 2'-O-Methyladenosine (mA)"
  variation 14: /note="A in position 14 is a 2'-fluoro-adenosine (fA)"
  variation 15: /note="C in position 15 is a 2'-O-Methylcytidine (mC)"
  variation 16: /note="A in position 16 is a 2'-fluoro-adenosine (fA)"
  variation 17: /note="C in position 17 is a 2'-O-Methylcytidine (mC)"
  variation 18: /note="U in position 18 is a 2'- fluoro-uridine (fU)"
  variation 19: /note="G in position 19 is a 2'-O-Methylguanosine (mG)"
  variation 20: /note="U in position 20 is a 2'- fluoro-uridine (fU)"
  variation 21: /note="U in position 21 is a 2'-O-Methyluridine (mU)"
  variation 21: /note="the nucleotide in position 21 and the nucleotide in position 22 are linked through a phosphorothiate linkage "
  variation 22: /note="U in position 22 is a 2'-O-Methyluridine (mU)"
  variation 22: /note="the nucleotide in position 22 and the nucleotide in position 21 are linked through a phosphorothiate linkage "
  variation 22: /note="the nucleotide in position 22 and the nucleotide in position 23 are linked through a phosphorothiate linkage "
  variation 23: /note="U in position 23 is a 2'-O-Methyluridine (mU)"
  variation 23: /note="the nucleotide in position 23 and the nucleotide in position 22 are linked through a phosphorothiate linkage "
uuatagagcaagaacacuguuuu

SEQ ID NO: 18 - RNA, 23 nt, Artificial Sequence
  as2-6
  variation 1: /note="U in position 1 is a 2'-O-Methyluridine (mU)"
  variation 1: /note="the nucleotide in position 1 and the nucleotide in position 2 are linked through a phosphorothiate linkage "
  variation 2: /note="U in position 2 is a 2'- fluoro-uridine (fU)"
  variation 2: /note="the nucleotide in position 2 and the nucleotide in position 1 are linked through a phosphorothiate "
  variation 2: /note="the nucleotide in position 2 and the nucleotide in position 3 are linked through a phosphorothiate "
  variation 3: /note="A in position 3 is a 2'-O-Methyladenosine (mA)"
  variation 3: /note="the nucleotide in position 3 and the nucleotide in position 2 are linked through a phosphorothiate linkage "
  variation 4: /note="U in position 4 is a 2'- fluoro-uridine (fU)"
  variation 5: /note="A in position 5 is a lA4a analog"
  variation 6: /note="G in position 6 is a 2'-fluoro-guanosine (fG)"
  variation 7: /note="A in position 7 is a 2'-O-Methyladenosine (mA)"
  variation 8: /note="G in position 8 is a 2'-fluoro-guanosine (fG)"
  variation 9: /note="C in position 9 is a 2'-O-Methylcytidine (mC)"
  variation 10: /note="A in position 10 is a 2'-fluoro-adenosine (fA)"
  variation 11: /note="A in position 11 is a 2'-O-Methyladenosine (mA)"
  variation 12: /note="G in position 12 is a 2'-O-Methylguanosine (mG)"
  variation 13: /note="A in position 13 is a 2'-O-Methyladenosine (mA)"
  variation 14: /note="A in position 14 is a 2'-fluoro-adenosine (fA)"
  variation 15: /note="C in position 15 is a 2'-O-Methylcytidine (mC)"
  variation 16: /note="A in position 16 is a 2'-fluoro-adenosine (fA)"
  variation 17: /note="C in position 17 is a 2'-O-Methylcytidine (mC)"
  variation 18: /note="U in position 18 is a 2'- fluoro-uridine (fU)"
  variation 19: /note="G in position 19 is a 2'-O-Methylguanosine (mG)"
  variation 20: /note="U in position 20 is a 2'- fluoro-uridine (fU)"
  variation 21: /note="U in position 21 is a 2'-O-Methyluridine (mU)"
  variation 21: /note="the nucleotide in position 21 and the nucleotide in position 22 are linked through a phosphorothiate "
  variation 22: /note="U in position 22 is a 2'-O-Methyluridine (mU)"
  variation 22: /note="the nucleotide in position 22 and the nucleotide in position 21 are linked through a phosphorothiate linkage "
  variation 22: /note="the nucleotide in position 22 and the nucleotide in position 23 are linked through a phosphorothiate linkage "
  variation 23: /note="U in position 23 is a 2'-O-Methyluridine (mU)"
  variation 23: /note="the nucleotide in position 23 and the nucleotide in position 22 are linked through a phosphorothiate linkage "
uuauagagcaagaacacuguuuu

SEQ ID NO: 19 - RNA, 23 nt, Artificial Sequence
  as2-7
  variation 1: /note="U in position 1 is a 2'-O-Methyluridine (mU)"
  variation 1: /note="the nucleotide in position 1 and the nucleotide in position 2 are linked through a phosphorothiate linkage "
  variation 2: /note="U in position 2 is a 2'- fluoro-uridine (fU)"
  variation 2: /note="the nucleotide in position 2 and the nucleotide in position 1 are linked through a phosphorothiate linkage "
  variation 2: /note="the nucleotide in position 2 and the nucleotide in position 3 are linked through a phosphorothiate linkage "
  variation 3: /note="A in position 3 is a 2'-O-Methyladenosine (mA)"
  variation 3: /note="the nucleotide in position 2 and the nucleotide in position 3 are linked through a phosphorothiate linkage "
  variation 4: /note="U in position 4 is a 2'- fluoro-uridine (fU)"
  variation 5: /note="T in position 5 is a lT4a analog"
  variation 6: /note="G in position 6 is a 2'-fluoro-guanosine (fG)"
  variation 7: /note="A in position 7 is a 2'-O-Methyladenosine (mA)"
  variation 8: /note="G in position 8 is a 2'-fluoro-guanosine (fG)"
  variation 9: /note="C in position 9 is a 2'-O-Methylcytidine (mC)"
  variation 10: /note="A in position 10 is a 2'-fluoro-adenosine (fA)"
  variation 11: /note="A in position 11 is a 2'-O-Methyladenosine (mA)"
  variation 12: /note="G in position 12 is a 2'-O-Methylguanosine (mG)"
  variation 13: /note="A in position 13 is a 2'-O-Methyladenosine (mA)"
  variation 14: /note="A in position 14 is a 2'-fluoro-adenosine (fA)"
  variation 15: /note="C in position 15 is a 2'-O-Methylcytidine (mC)"
  variation 16: /note="A in position 16 is a 2'-fluoro-adenosine (fA)"
  variation 17: /note="C in position 17 is a 2'-O-Methylcytidine (mC)"
  variation 18: /note="U in position 18 is a 2'- fluoro-uridine (fU)"
  variation 19: /note="G in position 19 is a 2'-O-Methylguanosine (mG)"
  variation 20: /note="U in position 20 is a 2'- fluoro-uridine (fU)"
  variation 21: /note="U in position 21 is a 2'-O-Methyluridine (mU)"
  variation 21: /note="the nucleotide in position 21 and the nucleotide in position 22 are linked through a phosphorothiate linkage "
  variation 22: /note="U in position 22 is a 2'-O-Methyluridine (mU)"
  variation 22: /note="the nucleotide in position 22 and the nucleotide in position 21 are linked through a phosphorothiate linkage "
  variation 22: /note="the nucleotide in position 22 and the nucleotide in position 23 are linked through a phosphorothiate linkage "
  variation 23: /note="U in position 23 is a 2'-O-Methyluridine (mU)"
  variation 23: /note="the nucleotide in position 23 and the nucleotide in position 22 are linked through a phosphorothiate linkage "
uuautgagcaagaacacuguuuu

SEQ ID NO: 20 - RNA, 23 nt, Artificial Sequence
  as2-8
  variation 1: /note="U in position 1 is a 2'-O-Methyluridine (mU)"
  variation 1: /note="the nucleotide in position 1 and the nucleotide in position 2 are linked through a phosphorothiate linkage "
  variation 2: /note="U in position 2 is a 2'- fluoro-uridine (fU)"
  variation 2: /note="the nucleotide in position 2 and the nucleotide in position 1 are linked through a phosphorothiate linkage "
  variation 2: /note="the nucleotide in position 2 and the nucleotide in position 3 are linked through a phosphorothiate linkage "
  variation 3: /note="A in position 3 is a 2'-O-Methyladenosine (mA)"
  variation 3: /note="the nucleotide in position 3 and the nucleotide in position 2 are linked through a phosphorothiate linkage "
  variation 4: /note="U in position 4 is a 2'- fluoro-uridine (fU)"
  variation 5: /note="A in position 5 is a 2'-O-Methyladenosine (mA)"
  variation 6: /note="G in position 6 is a lG4a analog"
  variation 7: /note="A in position 7 is a 2'-O-Methyladenosine (mA)"
  variation 8: /note="G in position 8 is a 2'-fluoro-guanosine (fG)"
  variation 9: /note="C in position 9 is a 2'-O-Methylcytidine (mC)"
  variation 10: /note="A in position 10 is a 2'-fluoro-adenosine (fA)"
  variation 11: /note="A in position 11 is a 2'-O-Methyladenosine (mA)"
  variation 12: /note="G in position 12 is a 2'-O-Methylguanosine (mG)"
  variation 13: /note="A in position 13 is a 2'-O-Methyladenosine (mA)"
  variation 14: /note="A in position 14 is a 2'-fluoro-adenosine (fA)"
  variation 15: /note="C in position 15 is a 2'-O-Methylcytidine (mC)"
  variation 16: /note="A in position 16 is a 2'-fluoro-adenosine (fA)"
  variation 17: /note="C in position 17 is a 2'-O-Methylcytidine (mC)"
  variation 18: /note="U in position 18 is a 2'- fluoro-uridine (fU)"
  variation 19: /note="G in position 19 is a 2'-O-Methylguanosine (mG)"
  variation 20: /note="U in position 20 is a 2'- fluoro-uridine (fU)"
  variation 21: /note="U in position 21 is a 2'-O-Methyluridine (mU)"
  variation 21: /note="the nucleotide in position 21 and the nucleotide in position 22 are linked through a phosphorothiate linkage "
  variation 22: /note="U in position 22 is a 2'-O-Methyluridine (mU)"
  variation 22: /note="the nucleotide in position 22 and the nucleotide in position 21 are linked through a phosphorothiate linkage "
  variation 22: /note="the nucleotide in position 22 and the nucleotide in position 23 are linked through a phosphorothiate linkage "
  variation 23: /note="U in position 23 is a 2'-O-Methyluridine (mU)"
  variation 23: /note="the nucleotide in position 23 and the nucleotide in position 22 are linked through a phosphorothiate linkage "
uuauagagcaagaacacuguuuu

SEQ ID NO: 21 - RNA, 23 nt, Artificial Sequence
  as2-9
  variation 1: /note="U in position 1 is a 2'-O-Methyluridine (mU)"
  variation 1: /note="the nucleotide in position 1 and the nucleotide in position 2 are linked through a phosphorothiate linkage "
  variation 2: /note="U in position 2 is a 2'- fluoro-uridine (fU)"
  variation 2: /note="the nucleotide in position 2 and the nucleotide in position 1 are linked through a phosphorothiate linkage "
  variation 2: /note="the nucleotide in position 2 and the nucleotide in position 3 are linked through a phosphorothiate linkage "
  variation 3: /note="A in position 3 is a 2'-O-Methyladenosine (mA)"
  variation 3: /note="the nucleotide in position 2 and the nucleotide in position 3 are linked through a phosphorothiate linkage "
  variation 4: /note="U in position 4 is a 2'- fluoro-uridine (fU)"
  variation 5: /note="A in position 5 is a 2'-O-Methyladenosine (mA)"
  variation 6: /note="T in position 6 is a lT4a analog"
  variation 7: /note="A in position 7 is a 2'-O-Methyladenosine (mA)"
  variation 8: /note="G in position 8 is a 2'-fluoro-guanosine (fG)"
  variation 9: /note="C in position 9 is a 2'-O-Methylcytidine (mC)"
  variation 10: /note="A in position 10 is a 2'-fluoro-adenosine (fA)"
  variation 11: /note="A in position 11 is a 2'-O-Methyladenosine (mA)"
  variation 12: /note="G in position 12 is a 2'-O-Methylguanosine (mG)"
  variation 13: /note="A in position 13 is a 2'-O-Methyladenosine (mA)"
  variation 14: /note="A in position 14 is a 2'-fluoro-adenosine (fA)"
  variation 15: /note="C in position 15 is a 2'-O-Methylcytidine (mC)"
  variation 16: /note="A in position 16 is a 2'-fluoro-adenosine (fA)"
  variation 17: /note="C in position 17 is a 2'-O-Methylcytidine (mC)"
  variation 18: /note="U in position 18 is a 2'- fluoro-uridine (fU)"
  variation 19: /note="G in position 19 is a 2'-O-Methylguanosine (mG)"
  variation 20: /note="U in position 20 is a 2'- fluoro-uridine (fU)"
  variation 21: /note="U in position 21 is a 2'-O-Methyluridine (mU"
  variation 21: /note="the nucleotide in position 21 and the nucleotide in position 22 are linked through a phosphorothiate linkage "
  variation 22: /note="U in position 22 is a 2'-O-Methyluridine (mU)"
  variation 22: /note="the nucleotide in position 22 and the nucleotide in position 21 are linked through a phosphorothiate linkage "
  variation 22: /note="the nucleotide in position 22 and the nucleotide in position 23 are linked through a phosphorothiate linkage "
  variation 23: /note="U in position 23 is a 2'-O-Methyluridine (mU)"
  variation 23: /note="the nucleotide in position 23 and the nucleotide in position 22 are linked through a phosphorothiate linkage "
uuauatagcaagaacacuguuuu

SEQ ID NO: 22 - RNA, 23 nt, Artificial Sequence
  as2-10
  variation 1: /note="U in position 1 is a 2'-O-Methyluridine (mU)"
  variation 1: /note="the nucleotide in position 1 and the nucleotide in position 2 are linked through a phosphorothiate linkage "
  variation 2: /note="U in position 2 is a 2'- fluoro-uridine (fU)"
  variation 2: /note="the nucleotide in position 2 and the nucleotide in position 1 are linked through a phosphorothiate linkage "
  variation 2: /note="the nucleotide in position 2 and the nucleotide in position 3 are linked through a phosphorothiate linkage "
  variation 3: /note="A in position 3 is a 2'-O-Methyladenosine (mA)"
  variation 3: /note="the nucleotide in position 3 and the nucleotide in position 2 are linked through a phosphorothiate linkage "
  variation 4: /note="U in position 4 is a 2'- fluoro-uridine (fU)"
  variation 5: /note="A in position 5 is a 2'-O-Methyladenosine (mA)"
  variation 6: /note="G in position 6 is a 2'-fluoro-guanosine (fG)"
  variation 7: /note="A in position 7 is a lA4a analog"
  variation 8: /note="G in position 8 is a 2'-fluoro-guanosine (fG)"
  variation 9: /note="C in position 9 is a 2'-O-Methylcytidine (mC)"
  variation 10: /note="A in position 10 is a 2'-fluoro-adenosine (fA)"
  variation 11: /note="A in position 11 is a 2'-O-Methyladenosine (mA)"
  variation 12: /note="G in position 12 is a 2'-O-Methylguanosine (mG)"
  variation 13: /note="A in position 13 is a 2'-O-Methyladenosine (mA)"
  variation 14: /note="A in position 14 is a 2'-fluoro-adenosine (fA)"
  variation 15: /note="C in position 15 is a 2'-O-Methylcytidine (mC)"
  variation 16: /note="A in position 16 is a 2'-fluoro-adenosine (fA)"
  variation 17: /note="C in position 17 is a 2'-O-Methylcytidine (mC)"
  variation 18: /note="U in position 18 is a 2'- fluoro-uridine (fU)"
  variation 19: /note="G in position 19 is a 2'-O-Methylguanosine (mG)"
  variation 20: /note="U in position 20 is a 2'- fluoro-uridine (fU)"
  variation 21: /note="U in position 21 is a 2'-O-Methyluridine (mU)"
  variation 21: /note="the nucleotide in position 21 and the nucleotide in position 22 are linked through a phosphorothiate linkage "
  variation 22: /note="U in position 22 is a 2'-O-Methyluridine (mU)"
  variation 22: /note="the nucleotide in position 22 and the nucleotide in position 21 are linked through a phosphorothiate linkage "
  variation 22: /note="the nucleotide in position 22 and the nucleotide in position 23 are linked through a phosphorothiate linkage "
  variation 23: /note="U in position 23 is a 2'-O-Methyluridine (mU)"
  variation 23: /note="the nucleotide in position 23 and the nucleotide in position 22 are linked through a phosphorothiate linkage "
uuauagagcaagaacacuguuuu

SEQ ID NO: 23 - RNA, 23 nt, Artificial Sequence
  as2-11
  variation 1: /note="U in position 1 is a 2'-O-Methyluridine (mU)"
  variation 1: /note="the nucleotide in position 1 and the nucleotide in position 2 are linked through a phosphorothiate linkage "
  variation 2: /note="U in position 2 is a 2'- fluoro-uridine (fU)"
  variation 2: /note="the nucleotide in position 2 and the nucleotide in position 1 are linked through a phosphorothiate linkage "
  variation 2: /note="the nucleotide in position 2 and the nucleotide in position 3 are linked through a phosphorothiate linkage "
  variation 3: /note="A in position 3 is a 2'-O-Methyladenosine (mA)"
  variation 3: /note="the nucleotide in position 3 and the nucleotide in position 2 are linked through a phosphorothiate linkage "
  variation 4: /note="U in position 4 is a 2'- fluoro-uridine (fU)"
  variation 5: /note="A in position 5 is a 2'-O-Methyladenosine (mA)"
  variation 6: /note="G in position 6 is a 2'-fluoro-guanosine (fG)"
  variation 7: /note="A in position 7 is a lA4b analog"
  variation 8: /note="G in position 8 is a 2'-fluoro-guanosine (fG)"
  variation 9: /note="C in position 9 is a 2'-O-Methylcytidine (mC)"
  variation 10: /note="A in position 10 is a 2'-fluoro-adenosine (fA)"
  variation 11: /note="A in position 11 is a 2'-O-Methyladenosine (mA)"
  variation 12: /note="G in position 12 is a 2'-O-Methylguanosine (mG)"
  variation 13: /note="A in position 13 is a 2'-O-Methyladenosine (mA)"
  variation 14: /note="A in position 14 is a 2'-fluoro-adenosine (fA)"
  variation 15: /note="C in position 15 is a 2'-O-Methylcytidine (mC)"
  variation 16: /note="A in position 16 is a 2'-fluoro-adenosine (fA)"
  variation 17: /note="C in position 17 is a 2'-O-Methylcytidine (mC)"
  variation 18: /note="U in position 18 is a 2'- fluoro-uridine (fU)"
  variation 19: /note="G in position 19 is a 2'-O-Methylguanosine (mG)"
  variation 20: /note="U in position 20 is a 2'- fluoro-uridine (fU)"
  variation 21: /note="U in position 21 is a 2'-O-Methyluridine (mU)"
  variation 21: /note="the nucleotide in position 21 and the nucleotide in position 22 are linked through a phosphorothiate linkage "
  variation 22: /note="U in position 22 is a 2'-O-Methyluridine (mU)"
  variation 22: /note="the nucleotide in position 22 and the nucleotide in position 21 are linked through a phosphorothiate linkage "
  variation 22: /note="the nucleotide in position 22 and the nucleotide in position 23 are linked through a phosphorothiate linkage "
  variation 23: /note="U in position 23 is a 2'-O-Methyluridine (mU)"
  variation 23: /note="the nucleotide in position 23 and the nucleotide in position 22 are linked through a phosphorothiate linkage "
uuauagagcaagaacacuguuuu

SEQ ID NO: 24 - RNA, 23 nt, Artificial Sequence
  as2-12
  variation 1: /note="U in position 1 is a 2'-O-Methyluridine (mU)"
  variation 1: /note="the nucleotide in position 1 and the nucleotide in position 2 are linked through a phosphorothiate linkage "
  variation 2: /note="U in position 2 is a 2'- fluoro-uridine (fU)"
  variation 2: /note="the nucleotide in position 2 and the nucleotide in position 1 are linked through a phosphorothiate linkage "
  variation 2: /note="the nucleotide in position 2 and the nucleotide in position 3 are linked through a phosphorothiate linkage "
  variation 3: /note="A in position 3 is a 2'-O-Methyladenosine (mA)"
  variation 3: /note="the nucleotide in position 2 and the nucleotide in position 2 are linked through a phosphorothiate linkage "
  variation 4: /note="U in position 4 is a 2'- fluoro-uridine (fU)"
  variation 5: /note="A in position 5 is a 2'-O-Methyladenosine (mA)"
  variation 6: /note="G in position 6 is a 2'-fluoro-guanosine (fG)"
  variation 7: /note="A in position 7 is a lA1a analog"
  variation 8: /note="G in position 8 is a 2'-fluoro-guanosine (fG)"
  variation 9: /note="C in position 9 is a 2'-O-Methylcytidine (mC)"
  variation 10: /note="A in position 10 is a 2'-fluoro-adenosine (fA)"
  variation 11: /note="A in position 11 is a 2'-O-Methyladenosine (mA)"
  variation 12: /note="G in position 12 is a 2'-O-Methylguanosine (mG)"
  variation 13: /note="A in position 13 is a 2'-O-Methyladenosine (mA)"
  variation 14: /note="A in position 14 is a 2'-fluoro-adenosine (fA)"
  variation 15: /note="C in position 15 is a 2'-O-Methylcytidine (mC)"
  variation 16: /note="A in position 16 is a 2'-fluoro-adenosine (fA)"
  variation 17: /note="C in position 17 is a 2'-O-Methylcytidine (mC)"
  variation 18: /note="U in position 18 is a 2'- fluoro-uridine (fU)"
  variation 19: /note="G in position 19 is a 2'-O-Methylguanosine (mG)"
  variation 20: /note="U in position 20 is a 2'- fluoro-uridine (fU)"
  variation 21: /note="U in position 21 is a 2'-O-Methyluridine (mU)"
  variation 21: /note="the nucleotide in position … and the nucleotide in position 21 are linked through a phosphorothiate "
  variation 22: /note="U in position 22 is a 2'-O-Methyluridine (mU)"
  variation 22: /note="the nucleotide in position 22 and the nucleotide in position 21 are linked through a phosphorothiate "
  variation 22: /note="the nucleotide in position 22 and the nucleotide in position 23 are linked through a phosphorothiate "
  variation 23: /note="U in position 23 is a 2'-O-Methyluridine (mU)"
  variation 23: /note="the nucleotide in position 23 and the nucleotide in position 22 are linked through a phosphorothiate linkage "
uuauagagcaagaacacuguuuu

SEQ ID NO: 25 - RNA, 23 nt, Artificial Sequence
  as2-13
  variation 1: /note="U in position 1 is a 2'-O-Methyluridine (mU)"
  variation 1: /note="the nucleotide in position 1 and the nucleotide in position 2 are linked through a phosphorothiate linkage "
  variation 1: /note="the nucleotide in position 21 and the nucleotide in position 22 are linked through a phosphorothiate linkage "
  variation 2: /note="U in position 2 is a 2'- fluoro-uridine (fU)"
  variation 2: /note="the nucleotide in position 2 and the nucleotide in position 1 are linked through a phosphorothiate linkage "
  variation 2: /note="the nucleotide in position 2 and the nucleotide in position 3 are linked through a phosphorothiate linkage "
  variation 3: /note="A in position 3 is a 2'-O-Methyladenosine (mA)"
  variation 3: /note="the nucleotide in position 3 and the nucleotide in position 2 are linked through a phosphorothiate linkage "
  variation 4: /note="U in position 4 is a 2'- fluoro-uridine (fU)"
  variation 5: /note="A in position 5 is a 2'-O-Methyladenosine (mA)"
  variation 6: /note="G in position 6 is a 2'-fluoro-guanosine (fG)"
  variation 7: /note="A in position 7 is a lA1b analog"
  variation 8: /note="G in position 8 is a 2'-fluoro-guanosine (fG)"
  variation 9: /note="C in position 9 is a 2'-O-Methylcytidine (mC)"
  variation 10: /note="A in position 10 is a 2'-fluoro-adenosine (fA)"
  variation 11: /note="A in position 11 is a 2'-O-Methyladenosine (mA)"
  variation 12: /note="G in position 12 is a 2'-O-Methylguanosine (mG)"
  variation 13: /note="A in position 13 is a 2'-O-Methyladenosine (mA)"
  variation 14: /note="A in position 14 is a 2'-fluoro-adenosine (fA)"
  variation 15: /note="C in position 15 is a 2'-O-Methylcytidine (mC)"
  variation 16: /note="A in position 16 is a 2'-fluoro-adenosine (fA)"
  variation 17: /note="C in position 17 is a 2'-O-Methylcytidine (mC)"
  variation 18: /note="U in position 18 is a 2'- fluoro-uridine (fU)"
  variation 19: /note="G in position 19 is a 2'-O-Methylguanosine (mG)"
  variation 20: /note="U in position 20 is a 2'- fluoro-uridine (fU)"
  variation 21: /note="U in position 21 is a 2'-O-Methyluridine (mU)"
  variation 22: /note="U in position 22 is a 2'-O-Methyluridine (mU)"
  variation 22: /note="the nucleotide in position 22 and the nucleotide in position 21 are linked through a phosphorothiate linkage "
  variation 22: /note="the nucleotide in position 22 and the nucleotide in position 23 are linked through a phosphorothiate linkage "
  variation 23: /note="U in position 23 is a 2'-O-Methyluridine (mU)"
  variation 23: /note="the nucleotide in position 23 and the nucleotide in position 22 are linked through a phosphorothiate "
uuauagagcaagaacacuguuuu

SEQ ID NO: 26 - RNA, 23 nt, Artificial Sequence
  as2-14
  variation 1: /note="U in position 1 is a 2'-O-Methyluridine (mU)"
  variation 1: /note="the nucleotide in position 1 and the nucleotide in position 2 are linked through a phosphorothiate "
  variation 2: /note="U in position 2 is a 2'- fluoro-uridine (fU)"
  variation 2: /note="the nucleotide in position 2 and the nucleotide in position 1 are linked through a phosphorothiate linkage "
  variation 2: /note="the nucleotide in position 2 and the nucleotide in position 3 are linked through a phosphorothiate linkage "
  variation 3: /note="A in position 3 is a 2'-O-Methyladenosine (mA)"
  variation 3: /note="the nucleotide in position 3 and the nucleotide in position 2 are linked through a phosphorothiate linkage "
  variation 4: /note="U in position 4 is a 2'- fluoro-uridine (fU)"
  variation 5: /note="A in position 5 is a 2'-O-Methyladenosine (mA)"
  variation 6: /note="G in position 6 is a 2'-fluoro-guanosine (fG)"
  variation 7: /note="T in position 7 is a lT4a analog"
  variation 8: /note="G in position 8 is a 2'-fluoro-guanosine (fG)"
  variation 9: /note="C in position 9 is a 2'-O-Methylcytidine (mC)"
  variation 10: /note="A in position 10 is a 2'-fluoro-adenosine (fA)"
  variation 11: /note="A in position 11 is a 2'-O-Methyladenosine (mA)"
  variation 12: /note="G in position 12 is a 2'-O-Methylguanosine (mG)"
  variation 13: /note="A in position 13 is a 2'-O-Methyladenosine (mA)"
  variation 14: /note="A in position 14 is a 2'-fluoro-adenosine (fA)"
  variation 15: /note="C in position 15 is a 2'-O-Methylcytidine (mC)"
  variation 16: /note="A in position 16 is a 2'-fluoro-adenosine (fA)"
  variation 17: /note="C in position 17 is a 2'-O-Methylcytidine (mC)"
  variation 18: /note="U in position 18 is a 2'- fluoro-uridine (fU)"
  variation 19: /note="G in position 19 is a 2'-O-Methylguanosine (mG)"
  variation 20: /note="U in position 20 is a 2'- fluoro-uridine (fU)"
  variation 21: /note="U in position 21 is a 2'-O-Methyluridine (mU)"
  variation 21: /note="the nucleotide in position 21 and the nucleotide in position 22 are linked through a phosphorothiate linkage "
  variation 22: /note="U in position 22 is a 2'-O-Methyluridine (mU)"
  variation 22: /note="the nucleotide in position 22 and the nucleotide in position 21 are linked through a phosphorothiate linkage "
  variation 22: /note="the nucleotide in position 22 and the nucleotide in position 23 are linked through a phosphorothiate linkage "
  variation 23: /note="U in position 23 is a 2'-O-Methyluridine (mU)"
  variation 23: /note="the nucleotide in position 23 and the nucleotide in position 22 are linked through a phosphorothiate linkage "
uuauagtgcaagaacacuguuuu

SEQ ID NO: 27 - RNA, 23 nt, Artificial Sequence
  as2-15
  variation 1: /note="U in position 1 is a 2'-O-Methyluridine (mU)"
  variation 1: /note="the nucleotide in position 1 and the nucleotide in position 2 are linked through a phosphorothiate linkage "
  variation 2: /note="U in position 2 is a 2'- fluoro-uridine (fU)"
  variation 2: /note="the nucleotide in position 2 and the nucleotide in position 1 are linked through a phosphorothiate linkage "
  variation 2: /note="the nucleotide in position 2 and the nucleotide in position 3 are linked through a phosphorothiate linkage "
  variation 3: /note="A in position 3 is a 2'-O-Methyladenosine (mA)"
  variation 3: /note="the nucleotide in position 3 and the nucleotide in position 2 are linked through a phosphorothiate linkage "
  variation 4: /note="U in position 4 is a 2'- fluoro-uridine (fU)"
  variation 5: /note="A in position 5 is a 2'-O-Methyladenosine (mA)"
  variation 6: /note="G in position 6 is a 2'-fluoro-guanosine (fG)"
  variation 7: /note="T in position 7 is a lT1a analog"
  variation 8: /note="G in position 8 is a 2'-fluoro-guanosine (fG)"
  variation 9: /note="C in position 9 is a 2'-O-Methylcytidine (mC)"
  variation 10: /note="A in position 10 is a 2'-fluoro-adenosine (fA)"
  variation 11: /note="A in position 11 is a 2'-O-Methyladenosine (mA)"
  variation 12: /note="G in position 12 is a 2'-O-Methylguanosine (mG)"
  variation 13: /note="A in position 13 is a 2'-O-Methyladenosine (mA)"
  variation 14: /note="A in position 14 is a 2'-fluoro-adenosine (fA)"
  variation 15: /note="C in position 15 is a 2'-O-Methylcytidine (mC)"
  variation 16: /note="A in position 16 is a 2'-fluoro-adenosine (fA)"
  variation 17: /note="C in position 17 is a 2'-O-Methylcytidine (mC)"
  variation 18: /note="U in position 18 is a 2'- fluoro-uridine (fU)"
  variation 19: /note="G in position 19 is a 2'-O-Methylguanosine (mG)"
  variation 20: /note="U in position 20 is a 2'- fluoro-uridine (fU)"
  variation 21: /note="U in position 21 is a 2'-O-Methyluridine (mU)"
  variation 21: /note="the nucleotide in position 21 and the nucleotide in position 22 are linked through a phosphorothiate linkage "
  variation 22: /note="U in position 22 is a 2'-O-Methyluridine (mU)"
  variation 22: /note="the nucleotide in position 22 and the nucleotide in position 21 are linked through a phosphorothiate linkage "
  variation 22: /note="the nucleotide in position 22 and the nucleotide in position 23 are linked through a phosphorothiate linkage "
  variation 23: /note="U in position 23 is a 2'-O-Methyluridine (mU)"
  variation 23: /note="the nucleotide in position 23 and the nucleotide in position 22 are linked through a phosphorothiate "
uuauagtgcaagaacacuguuuu

SEQ ID NO: 28 - RNA, 23 nt, Artificial Sequence
  as2-16
  variation 1: /note="U in position 1 is a 2'-O-Methyluridine (mU)"
  variation 1: /note="the nucleotide in position 1 and the nucleotide in position 2 are linked through a phosphorothiate "
  variation 2: /note="U in position 2 is a 2'- fluoro-uridine (fU)"
  variation 2: /note="the nucleotide in position 2 and the nucleotide in position 1 are linked through a phosphorothiate linkage "
  variation 2: /note="the nucleotide in position 2 and the nucleotide in position 3 are linked through a phosphorothiate linkage "
  variation 3: /note="A in position 3 is a 2'-O-Methyladenosine (mA)"
  variation 3: /note="the nucleotide in position 3 and the nucleotide in position 2 are linked through a phosphorothiate linkage "
  variation 4: /note="U in position 4 is a 2'- fluoro-uridine (fU)"
  variation 5: /note="A in position 5 is a 2'-O-Methyladenosine (mA)"
  variation 6: /note="G in position 6 is a 2'-fluoro-guanosine (fG)"
  variation 7: /note="A in position 7 is a 2'-O-Methyladenosine (mA)"
  variation 8: /note="G in position 8 is a lG4a analog"
  variation 9: /note="C in position 9 is a 2'-O-Methylcytidine (mC)"
  variation 10: /note="A in position 10 is a 2'-fluoro-adenosine (fA)"
  variation 11: /note="A in position 11 is a 2'-O-Methyladenosine (mA)"
  variation 12: /note="G in position 12 is a 2'-O-Methylguanosine (mG)"
  variation 13: /note="A in position 13 is a 2'-O-Methyladenosine (mA)"
  variation 14: /note="A in position 14 is a 2'-fluoro-adenosine (fA)"
  variation 15: /note="C in position 15 is a 2'-O-Methylcytidine (mC)"
  variation 16: /note="A in position 16 is a 2'-fluoro-adenosine (fA)"
  variation 17: /note="C in position 17 is a 2'-O-Methylcytidine (mC)"
  variation 18: /note="U in position 18 is a 2'- fluoro-uridine (fU)"
  variation 19: /note="G in position 19 is a 2'-O-Methylguanosine (mG)"
  variation 20: /note="U in position 20 is a 2'- fluoro-uridine (fU)"
  variation 21: /note="U in position 21 is a 2'-O-Methyluridine (mU)"
  variation 21: /note="the nucleotide in position 21 and the nucleotide in position 22 are linked through a phosphorothiate linkage "
  variation 22: /note="U in position 22 is a 2'-O-Methyluridine (mU)"
  variation 22: /note="the nucleotide in position 22 and the nucleotide in position 21 are linked through a phosphorothiate linkage "
  variation 22: /note="the nucleotide in position 22 and the nucleotide in position 23 are linked through a phosphorothiate linkage "
  variation 23: /note="U in position 23 is a 2'-O-Methyluridine (mU)"
  variation 23: /note="the nucleotide in position 23 and the nucleotide in position 22 are linked through a phosphorothiate linkage "
uuauagagcaagaacacuguuuu

SEQ ID NO: 29 - RNA, 23 nt, Artificial Sequence
  as2-17
  variation 1: /note="U in position 1 is a 2'-O-Methyluridine (mU)"
  variation 1: /note="the nucleotide in position 1 and the nucleotide in position 2 are linked through a phosphorothiate "
  variation 2: /note="U in position 2 is a 2'- fluoro-uridine (fU)"
  variation 2: /note="the nucleotide in position 2 and the nucleotide in position 1 are linked through a phosphorothiate linkage "
  variation 2: /note="the nucleotide in position 2 and the nucleotide in position 3 are linked through a phosphorothiate linkage "
  variation 3: /note="U in position 3 is a 2'-O-Methyluridine (mU)"
  variation 3: /note="the nucleotide in position 3 and the nucleotide in position 2 are linked through a phosphorothiate linkage "
  variation 4: /note="U in position 4 is a 2'- fluoro-uridine (fU)"
  variation 5: /note="A in position 5 is a 2'-O-Methyladenosine (mA)"
  variation 6: /note="G in position 6 is a 2'-fluoro-guanosine (fG)"
  variation 7: /note="A in position 7 is a 2'-O-Methyladenosine (mA)"
  variation 8: /note="T in position 8 is a lT4a analog"
  variation 9: /note="C in position 9 is a 2'-O-Methylcytidine (mC)"
  variation 10: /note="A in position 10 is a 2'-fluoro-adenosine (fA)"
  variation 11: /note="A in position 11 is a 2'-O-Methyladenosine (mA)"
  variation 12: /note="G in position 12 is a 2'-O-Methylguanosine (mG)"
  variation 13: /note="A in position 13 is a 2'-O-Methyladenosine (mA)"
  variation 14: /note="A in position 14 is a 2'-fluoro-adenosine (fA)"
  variation 15: /note="C in position 15 is a 2'-O-Methylcytidine (mC)"
  variation 16: /note="A in position 16 is a 2'-fluoro-adenosine (fA)"
  variation 17: /note="C in position 17 is a 2'-O-Methylcytidine (mC)"
  variation 18: /note="U in position 18 is a 2'- fluoro-uridine (fU)"
  variation 19: /note="G in position 19 is a 2'-O-Methylguanosine (mG)"
  variation 20: /note="U in position 20 is a 2'- fluoro-uridine (fU)"
  variation 21: /note="U in position 21 is a 2'-O-Methyluridine (mU)"
  variation 21: /note="the nucleotide in position 21 and the nucleotide in position 22 are linked through a phosphorothiate linkage "
  variation 22: /note="U in position 22 is a 2'-O-Methyluridine (mU)"
  variation 22: /note="the nucleotide in position 22 and the nucleotide in position 21 are linked through a phosphorothiate "
  variation 22: /note="the nucleotide in position 22 and the nucleotide in position 23 are linked through a phosphorothiate "
  variation 23: /note="U in position 23 is a 2'-O-Methyluridine (mU)"
  variation 23: /note="the nucleotide in position 23 and the nucleotide in position 22 are linked through a phosphorothiate linkage "
uuauagatcaagaacacuguuuu

SEQ ID NO: 30 - RNA, 24 nt, Artificial Sequence
  ss3-1
  variation 1: /note="T in position 1 is a lgT7 analog"
  variation 2: /note="T in position 2 is a lgT7 analog"
  variation 3: /note="T in position 3 is a lgT7 analog"
  variation 4: /note="A in position 4 is a 2'-fluoro-adenosine (fA)"
  variation 5: /note="A in position 5 is a 2'-O-Methyladenosine (mA)"
  variation 6: /note="C in position 6 is a 2'-fluoro-cytidine (fC)"
  variation 7: /note="A in position 7 is a 2'-O-Methyladenosine (mA)"
  variation 8: /note="G in position 8 is a 2'-fluoro-guanosine (fG)"
  variation 9: /note="U in position 9 is a 2'-O-Methyluridine (mU)"
  variation 10: /note="G in position 10 is a 2'-fluoro-guanosine (fG)"
  variation 11: /note="U in position 11 is a 2'-O-Methyluridine (mU)"
  variation 12: /note="U in position 12 is a 2'- fluoro-uridine (fU)"
  variation 13: /note="C in position 13 is a 2'-fluoro-cytidine (fC)"
  variation 14: /note="U in position 14 is a 2'- fluoro-uridine (fU)"
  variation 15: /note="U in position 15 is a 2'-O-Methyluridine (mU)"
  variation 16: /note="G in position 16 is a 2'-fluoro-guanosine (fG)"
  variation 17: /note="C in position 17 is a 2'-O-Methylcytidine (mC)"
  variation 18: /note="U in position 18 is a 2'- fluoro-uridine (fU)"
  variation 19: /note="C in position 19 is a 2'-O-Methylcytidine (mC)"
  variation 20: /note="U in position 20 is a 2'- fluoro-uridine (fU)"
  variation 21: /note="A in position 21 is a 2'-O-Methyladenosine (mA)"
  variation 22: /note="U in position 22 is a 2'- fluoro-uridine (fU)"
  variation 22: /note="the nucleotide in position 22 and the nucleotide in position 23 are linked through a phosphorothiate linkage "
  variation 23: /note="A in position 23 is a 2'-O-Methyladenosine (mA)"
  variation 23: /note="the nucleotide in position 23 and the nucleotide in position 22 are linked through a phosphorothiate linkage "
  variation 23: /note="the nucleotide in position 23 and the nucleotide in position 24 are linked through a phosphorothiate linkage "
  variation 24: /note="A in position 24 is a 2'-fluoro-adenosine (fA)"
  variation 24: /note="the nucleotide in position 24 and the nucleotide in position 23 are linked through a phosphorothiate linkage "
tttaacaguguucuugcucuauaa

SEQ ID NO: 31 - RNA, 24 nt, Artificial Sequence
  ss3-2
  variation 1: /note="T in position 1 is a lgT7 analog"
  variation 2: /note="T in position 2 is a lgT7 analog"
  variation 3: /note="T in position 3 is a lgT7 analog"
  variation 4: /note="A in position 4 is a lA4b analog"
  variation 5: /note="A in position 5 is a 2'-O-Methyladenosine (mA)"
  variation 6: /note="C in position 6 is a 2'-fluoro-cytidine (fC)"
  variation 7: /note="A in position 7 is a 2'-O-Methyladenosine (mA)"
  variation 8: /note="G in position 8 is a 2'-fluoro-guanosine (fG)"
  variation 9: /note="U in position 9 is a 2'-O-Methyluridine (mU)"
  variation 10: /note="G in position 10 is a 2'-fluoro-guanosine (fG)"
  variation 11: /note="U in position 11 is a 2'-O-Methyluridine (mU)"
  variation 12: /note="U in position 12 is a 2'- fluoro-uridine (fU)"
  variation 13: /note="C in position 13 is a 2'-fluoro-cytidine (fC)"
  variation 14: /note="U in position 14 is a 2'- fluoro-uridine (fU)"
  variation 15: /note="U in position 15 is a 2'-O-Methyluridine (mU)"
  variation 16: /note="G in position 16 is a 2'-fluoro-guanosine (fG)"
  variation 17: /note="C in position 17 is a 2'-O-Methylcytidine (mC)"
  variation 18: /note="U in position 18 is a 2'- fluoro-uridine (fU)"
  variation 19: /note="C in position 19 is a 2'-O-Methylcytidine (mC)"
  variation 20: /note="U in position 20 is a 2'- fluoro-uridine (fU)"
  variation 21: /note="A in position 21 is a 2'-O-Methyladenosine (mA)"
  variation 22: /note="U in position 22 is a 2'- fluoro-uridine (fU)"
  variation 22: /note="the nucleotide in position 22 and the nucleotide in position 23 are linked through a phosphorothiate linkage "
  variation 23: /note="A in position 23 is a 2'-O-Methyladenosine (mA)"
  variation 23: /note="the nucleotide in position 23 and the nucleotide in position 22 are linked through a phosphorothiate linkage "
  variation 23: /note="the nucleotide in position 23 and the nucleotide in position 24 are linked through a phosphorothiate linkage "
  variation 24: /note="A in position 24 is a 2'-fluoro-adenosine (fA)"
  variation 24: /note="the nucleotide in position 24 and the nucleotide in position 23 are linked through a phosphorothiate linkage "
tttaacaguguucuugcucuauaa

SEQ ID NO: 32 - RNA, 24 nt, Artificial Sequence
  ss3-3
  variation 1: /note="T in position 1 is a lgT7 analog"
  variation 2: /note="T in position 2 is a lgT7 analog"
  variation 3: /note="T in position 3 is a lgT7 analog"
  variation 4: /note="A in position 4 is a 2'-fluoro-adenosine (fA)"
  variation 5: /note="A in position 5 is a lA4b analog"
  variation 6: /note="C in position 6 is a 2'-fluoro-cytidine (fC)"
  variation 7: /note="A in position 7 is a 2'-O-Methyladenosine (mA)"
  variation 8: /note="G in position 8 is a 2'-fluoro-guanosine (fG)"
  variation 9: /note="U in position 9 is a 2'-O-Methyluridine (mU)"
  variation 10: /note="G in position 10 is a 2'-fluoro-guanosine (fG)"
  variation 11: /note="U in position 11 is a 2'-O-Methyluridine (mU)"
  variation 12: /note="U in position 12 is a 2'- fluoro-uridine (fU)"
  variation 13: /note="C in position 13 is a 2'-fluoro-cytidine (fC)"
  variation 14: /note="U in position 14 is a 2'- fluoro-uridine (fU)"
  variation 15: /note="U in position 15 is a 2'-O-Methyluridine (mU)"
  variation 16: /note="G in position 16 is a 2'-fluoro-guanosine (fG)"
  variation 17: /note="C in position 17 is a 2'-O-Methylcytidine (mC)"
  variation 18: /note="U in position 18 is a 2'- fluoro-uridine (fU)"
  variation 19: /note="C in position 19 is a 2'-O-Methylcytidine (mC)"
  variation 20: /note="U in position 20 is a 2'- fluoro-uridine (fU)"
  variation 21: /note="A in position 21 is a 2'-O-Methyladenosine (mA)"
  variation 22: /note="U in position 22 is a 2'- fluoro-uridine (fU)"
  variation 22: /note="the nucleotide in position 22 and the nucleotide in position 23 are linked through a phosphorothiate linkage "
  variation 23: /note="A in position 23 is a 2'-O-Methyladenosine (mA)"
  variation 23: /note="the nucleotide in position 23 and the nucleotide in position 22 are linked through a phosphorothiate linkage "
  variation 23: /note="the nucleotide in position 23 and the nucleotide in position 24 are linked through a phosphorothiate linkage "
  variation 24: /note="A in position 24 is a 2'-fluoro-adenosine (fA)"
  variation 24: /note="the nucleotide in position 24 and the nucleotide in position 23 are linked through a phosphorothiate linkage "
tttaacaguguucuugcucuauaa

SEQ ID NO: 33 - RNA, 24 nt, Artificial Sequence
  ss3-4
  variation 1: /note="T in position 1 is a lgT7 analog"
  variation 2: /note="T in position 2 is a lgT7 analog"
  variation 3: /note="T in position 3 is a lgT7 analog"
  variation 4: /note="A in position 4 is a 2'-fluoro-adenosine (fA)"
  variation 5: /note="A in position 5 is a 2'-O-Methyladenosine (mA)"
  variation 6: /note="C in position 6 is a lC4b analog"
  variation 7: /note="A in position 7 is a 2'-O-Methyladenosine (mA)"
  variation 8: /note="G in position 8 is a 2'-fluoro-guanosine (fG)"
  variation 9: /note="U in position 9 is a 2'-O-Methyluridine (mU)"
  variation 10: /note="G in position 10 is a 2'-fluoro-guanosine (fG)"
  variation 11: /note="U in position 11 is a 2'-O-Methyluridine (mU)"
  variation 12: /note="U in position 12 is a 2'- fluoro-uridine (fU)"
  variation 13: /note="C in position 13 is a 2'-fluoro-cytidine (fC)"
  variation 14: /note="U in position 14 is a 2'- fluoro-uridine (fU)"
  variation 15: /note="U in position 15 is a 2'-O-Methyluridine (mU)"
  variation 16: /note="G in position 16 is a 2'-fluoro-guanosine (fG)"
  variation 17: /note="C in position 17 is a 2'-O-Methylcytidine (mC)"
  variation 18: /note="U in position 18 is a 2'- fluoro-uridine (fU)"
  variation 19: /note="C in position 19 is a 2'-O-Methylcytidine (mC)"
  variation 20: /note="U in position 20 is a 2'- fluoro-uridine (fU)"
  variation 21: /note="A in position 21 is a 2'-O-Methyladenosine (mA)"
  variation 22: /note="U in position 22 is a 2'- fluoro-uridine (fU)"
  variation 22: /note="the nucleotide in position 22 and the nucleotide in position 23 are linked through a phosphorothiate linkage "
  variation 23: /note="A in position 23 is a 2'-O-Methyladenosine (mA)"
  variation 23: /note="the nucleotide in position 23 and the nucleotide in position 22 are linked through a phosphorothiate linkage "
  variation 23: /note="the nucleotide in position 23 and the nucleotide in position 24 are linked through a phosphorothiate linkage "
  variation 24: /note="A in position 24 is a 2'-fluoro-adenosine (fA)"
  variation 24: /note="the nucleotide in position 24 and the nucleotide in position 23 are linked through a phosphorothiate linkage "
tttaacaguguucuugcucuauaa

SEQ ID NO: 34 - RNA, 24 nt, Artificial Sequence
  ss3-5
  variation 1: /note="T in position 1 is a lgT7 analog"
  variation 2: /note="T in position 2 is a lgT7 analog"
  variation 3: /note="T in position 3 is a lgT7 analog"
  variation 4: /note="A in position 4 is a 2'-fluoro-adenosine (fA)"
  variation 5: /note="A in position 5 is a 2'-O-Methyladenosine (mA)"
  variation 6: /note="C in position 6 is a 2'-fluoro-cytidine (fC)"
  variation 7: /note="A in position 7 is a lA4b analog"
  variation 8: /note="G in position 8 is a 2'-fluoro-guanosine (fG)"
  variation 9: /note="U in position 9 is a 2'-O-Methyluridine (mU)"
  variation 10: /note="G in position 10 is a 2'-fluoro-guanosine (fG)"
  variation 11: /note="U in position 11 is a 2'-O-Methyluridine (mU)"
  variation 12: /note="U in position 12 is a 2'- fluoro-uridine (fU)"
  variation 13: /note="C in position 13 is a 2'-fluoro-cytidine (fC)"
  variation 14: /note="U in position 14 is a 2'- fluoro-uridine (fU)"
  variation 15: /note="U in position 15 is a 2'-O-Methyluridine (mU)"
  variation 16: /note="G in position 16 is a 2'-fluoro-guanosine (fG)"
  variation 17: /note="C in position 17 is a 2'-O-Methylcytidine (mC)"
  variation 18: /note="U in position 18 is a 2'- fluoro-uridine (fU)"
  variation 19: /note="C in position 19 is a 2'-O-Methylcytidine (mC)"
  variation 20: /note="U in position 20 is a 2'- fluoro-uridine (fU)"
  variation 21: /note="A in position 21 is a 2'-O-Methyladenosine (mA)"
  variation 22: /note="U in position 22 is a 2'- fluoro-uridine (fU)"
  variation 22: /note="the nucleotide in position 22 and the nucleotide in position 23 are linked through a phosphorothiate linkage "
  variation 23: /note="A in position 23 is a 2'-O-Methyladenosine (mA)"
  variation 23: /note="the nucleotide in position 23 and the nucleotide in position 22 are linked through a phosphorothiate linkage "
  variation 23: /note="the nucleotide in position 23 and the nucleotide in position 24 are linked through a phosphorothiate linkage "
  variation 24: /note="A in position 24 is a 2'-fluoro-adenosine (fA)"
  variation 24: /note="the nucleotide in position 24 and the nucleotide in position 23 are linked through a phosphorothiate linkage "
tttaacaguguucuugcucuauaa

SEQ ID NO: 35 - RNA, 24 nt, Artificial Sequence
  ss3-6
  variation 1: /note="T in position 1 is a lgT7 analog"
  variation 2: /note="T in position 2 is a lgT7 analog"
  variation 3: /note="T in position 3 is a lgT7 analog"
  variation 4: /note="A in position 4 is a 2'-fluoro-adenosine (fA)"
  variation 5: /note="A in position 5 is a 2'-O-Methyladenosine (mA)"
  variation 6: /note="C in position 6 is a 2'-fluoro-cytidine (fC)"
  variation 7: /note="A in position 7 is a 2'-O-Methyladenosine (mA)"
  variation 8: /note="G in position 8 is a lG4b analog"
  variation 9: /note="U in position 9 is a 2'-O-Methyluridine (mU)"
  variation 10: /note="G in position 10 is a 2'-fluoro-guanosine (fG)"
  variation 11: /note="U in position 11 is a 2'-O-Methyluridine (mU)"
  variation 12: /note="U in position 12 is a 2'- fluoro-uridine (fU)"
  variation 13: /note="C in position 13 is a 2'-fluoro-cytidine (fC)"
  variation 14: /note="U in position 14 is a 2'- fluoro-uridine (fU)"
  variation 15: /note="U in position 15 is a 2'-O-Methyluridine (mU)"
  variation 16: /note="G in position 16 is a 2'-fluoro-guanosine (fG)"
  variation 17: /note="C in position 17 is a 2'-O-Methylcytidine (mC)"
  variation 18: /note="U in position 18 is a 2'- fluoro-uridine (fU)"
  variation 19: /note="C in position 19 is a 2'-O-Methylcytidine (mC)"
  variation 20: /note="U in position 20 is a 2'- fluoro-uridine (fU)"
  variation 21: /note="A in position 21 is a 2'-O-Methyladenosine (mA)"
  variation 22: /note="U in position 22 is a 2'- fluoro-uridine (fU)"
  variation 22: /note="the nucleotide in position 22 and the nucleotide in position 23 are linked through a phosphorothiate linkage "
  variation 23: /note="A in position 23 is a 2'-O-Methyladenosine (mA)"
  variation 23: /note="the nucleotide in position 23 and the nucleotide in position 22 are linked through a phosphorothiate linkage "
  variation 23: /note="the nucleotide in position 23 and the nucleotide in position 24 are linked through a phosphorothiate linkage "
  variation 24: /note="A in position 24 is a 2'-fluoro-adenosine (fA)"
  variation 24: /note="the nucleotide in position 24 and the nucleotide in position 23 are linked through a phosphorothiate linkage "
tttaacaguguucuugcucuauaa

SEQ ID NO: 36 - RNA, 24 nt, Artificial Sequence
  ss3-7
  variation 1: /note="T in position 1 is a lgT7 analog"
  variation 2: /note="T in position 2 is a lgT7 analog"
  variation 3: /note="T in position 3 is a lgT7 analog"
  variation 4: /note="A in position 4 is a 2'-fluoro-adenosine (fA)"
  variation 5: /note="A in position 5 is a 2'-O-Methyladenosine (mA)"
  variation 6: /note="C in position 6 is a 2'-fluoro-cytidine (fC)"
  variation 7: /note="A in position 7 is a 2'-O-Methyladenosine (mA)"
  variation 8: /note="G in position 8 is a 2'-fluoro-guanosine (fG)"
  variation 9: /note="U in position 9 is a lU4b analog"
  variation 10: /note="G in position 10 is a 2'-fluoro-guanosine (fG)"
  variation 11: /note="U in position 11 is a 2'-O-Methyluridine (mU)"
  variation 12: /note="U in position 12 is a 2'- fluoro-uridine (fU)"
  variation 13: /note="C in position 13 is a 2'-fluoro-cytidine (fC)"
  variation 14: /note="U in position 14 is a 2'- fluoro-uridine (fU)"
  variation 15: /note="U in position 15 is a 2'-O-Methyluridine (mU)"
  variation 16: /note="G in position 16 is a 2'-fluoro-guanosine (fG)"
  variation 17: /note="C in position 17 is a 2'-O-Methylcytidine (mC)"
  variation 18: /note="U in position 18 is a 2'- fluoro-uridine (fU)"
  variation 19: /note="C in position 19 is a 2'-O-Methylcytidine (mC)"
  variation 20: /note="U in position 20 is a 2'- fluoro-uridine (fU)"
  variation 21: /note="A in position 21 is a 2'-O-Methyladenosine (mA)"
  variation 22: /note="U in position 22 is a 2'- fluoro-uridine (fU)"
  variation 22: /note="the nucleotide in position 22 and the nucleotide in position 23 are linked through a phosphorothiate linkage "
  variation 23: /note="A in position 23 is a 2'-O-Methyladenosine (mA)"
  variation 23: /note="the nucleotide in position 23 and the nucleotide in position 22 are linked through a phosphorothiate linkage "
  variation 23: /note="the nucleotide in position 23 and the nucleotide in position 24 are linked through a phosphorothiate linkage "
  variation 24: /note="A in position 24 is a 2'-fluoro-adenosine (fA)"
  variation 24: /note="the nucleotide in position 24 and the nucleotide in position 23 are linked through a phosphorothiate linkage "
tttaacaguguucuugcucuauaa

SEQ ID NO: 37 - RNA, 24 nt, Artificial Sequence
  ss3-8
  variation 1: /note="T in position 1 is a lgT7 analog"
  variation 2: /note="T in position 2 is a lgT7 analog"
  variation 3: /note="T in position 3 is a lgT7 analog"
  variation 4: /note="A in position 4 is a 2'-fluoro-adenosine (fA)"
  variation 5: /note="A in position 5 is a 2'-O-Methyladenosine (mA)"
  variation 6: /note="C in position 6 is a 2'-fluoro-cytidine (fC)"
  variation 7: /note="A in position 7 is a 2'-O-Methyladenosine (mA)"
  variation 8: /note="G in position 8 is a 2'-fluoro-guanosine (fG)"
  variation 9: /note="U in position 9 is a 2'-O-Methyluridine (mU)"
  variation 10: /note="G in position 10 is a lG4b analog"
  variation 11: /note="U in position 11 is a 2'-O-Methyluridine (mU)"
  variation 12: /note="U in position 12 is a 2'- fluoro-uridine (fU)"
  variation 13: /note="C in position 13 is a 2'-fluoro-cytidine (fC)"
  variation 14: /note="U in position 14 is a 2'- fluoro-uridine (fU)"
  variation 15: /note="U in position 15 is a 2'-O-Methyluridine (mU)"
  variation 16: /note="G in position 16 is a 2'-fluoro-guanosine (fG)"
  variation 17: /note="C in position 17 is a 2'-O-Methylcytidine (mC)"
  variation 18: /note="U in position 18 is a 2'- fluoro-uridine (fU)"
  variation 19: /note="C in position 19 is a 2'-O-Methylcytidine (mC)"
  variation 20: /note="U in position 20 is a 2'- fluoro-uridine (fU)"
  variation 21: /note="A in position 21 is a 2'-O-Methyladenosine (mA)"
  variation 22: /note="U in position 22 is a 2'- fluoro-uridine (fU)"
  variation 22: /note="the nucleotide in position 22 and the nucleotide in position 23 are linked through a phosphorothiate linkage "
  variation 23: /note="A in position 23 is a 2'-O-Methyladenosine (mA)"
  variation 23: /note="the nucleotide in position 23 and the nucleotide in position 22 are linked through a phosphorothiate linkage "
  variation 23: /note="the nucleotide in position 23 and the nucleotide in position 24 are linked through a phosphorothiate linkage "
  variation 24: /note="A in position 24 is a 2'-fluoro-adenosine (fA)"
  variation 24: /note="the nucleotide in position 24 and the nucleotide in position 23 are linked through a phosphorothiate linkage "
tttaacaguguucuugcucuauaa

SEQ ID NO: 38 - RNA, 24 nt, Artificial Sequence
  ss3-9
  variation 1: /note="T in position 1 is a lgT7 analog"
  variation 2: /note="T in position 2 is a lgT7 analog"
  variation 3: /note="T in position 3 is a lgT7 analog"
  variation 4: /note="A in position 4 is a 2'-fluoro-adenosine (fA)"
  variation 5: /note="A in position 5 is a 2'-O-Methyladenosine (mA)"
  variation 6: /note="C in position 6 is a 2'-fluoro-cytidine (fC)"
  variation 7: /note="A in position 7 is a 2'-O-Methyladenosine (mA)"
  variation 8: /note="G in position 8 is a 2'-fluoro-guanosine (fG)"
  variation 9: /note="U in position 9 is a 2'-O-Methyluridine (mU)"
  variation 10: /note="G in position 10 is a 2'-fluoro-guanosine (fG)"
  variation 11: /note="U in position 11 is a lU4b analog"
  variation 12: /note="U in position 12 is a 2'- fluoro-uridine (fU)"
  variation 13: /note="C in position 13 is a 2'-fluoro-cytidine (fC)"
  variation 14: /note="U in position 14 is a 2'- fluoro-uridine (fU)"
  variation 15: /note="U in position 15 is a 2'-O-Methyluridine (mU)"
  variation 16: /note="G in position 16 is a 2'-fluoro-guanosine (fG)"
  variation 17: /note="C in position 17 is a 2'-O-Methylcytidine (mC)"
  variation 18: /note="U in position 18 is a 2'- fluoro-uridine (fU)"
  variation 19: /note="C in position 19 is a 2'-O-Methylcytidine (mC)"
  variation 20: /note="U in position 20 is a 2'- fluoro-uridine (fU)"
  variation 21: /note="A in position 21 is a 2'-O-Methyladenosine (mA)"
  variation 22: /note="U in position 22 is a 2'- fluoro-uridine (fU)"
  variation 22: /note="the nucleotide in position 22 and the nucleotide in position 23 are linked through a phosphorothiate linkage "
  variation 23: /note="A in position 23 is a 2'-O-Methyladenosine (mA)"
  variation 23: /note="the nucleotide in position 23 and the nucleotide in position 22 are linked through a phosphorothiate linkage "
  variation 23: /note="the nucleotide in position 23 and the nucleotide in position 24 are linked through a phosphorothiate linkage "
  variation 24: /note="A in position 24 is a 2'-fluoro-adenosine (fA)"
  variation 24: /note="the nucleotide in position 24 and the nucleotide in position 23 are linked through a phosphorothiate linkage "
tttaacaguguucuugcucuauaa

SEQ ID NO: 39 - RNA, 24 nt, Artificial Sequence
  ss3-10
  variation 1: /note="T in position 1 is a lgT7 analog"
  variation 2: /note="T in position 2 is a lgT7 analog"
  variation 3: /note="T in position 3 is a lgT7 analog"
  variation 4: /note="A in position 4 is a 2'-fluoro-adenosine (fA)"
  variation 5: /note="A in position 5 is a 2'-O-Methyladenosine (mA)"
  variation 6: /note="C in position 6 is a 2'-fluoro-cytidine (fC)"
  variation 7: /note="A in position 7 is a 2'-O-Methyladenosine (mA)"
  variation 8: /note="G in position 8 is a 2'-fluoro-guanosine (fG)"
  variation 9: /note="U in position 9 is a 2'-O-Methyluridine (mU)"
  variation 10: /note="G in position 10 is a 2'-fluoro-guanosine (fG)"
  variation 11: /note="U in position 11 is a 2'-O-Methyluridine (mU)"
  variation 12: /note="U in position 12 is a lU4b analog"
  variation 13: /note="C in position 13 is a 2'-fluoro-cytidine (fC)"
  variation 14: /note="U in position 14 is a 2'- fluoro-uridine (fU)"
  variation 15: /note="U in position 15 is a 2'-O-Methyluridine (mU)"
  variation 16: /note="G in position 16 is a 2'-fluoro-guanosine (fG)"
  variation 17: /note="C in position 17 is a 2'-O-Methylcytidine (mC)"
  variation 18: /note="U in position 18 is a 2'- fluoro-uridine (fU)"
  variation 19: /note="C in position 19 is a 2'-O-Methylcytidine (mC)"
  variation 20: /note="U in position 20 is a 2'- fluoro-uridine (fU)"
  variation 21: /note="A in position 21 is a 2'-O-Methyladenosine (mA)"
  variation 22: /note="U in position 22 is a 2'- fluoro-uridine (fU)"
  variation 22: /note="the nucleotide in position 22 and the nucleotide in position 23 are linked through a phosphorothiate linkage "
  variation 23: /note="A in position 23 is a 2'-O-Methyladenosine (mA)"
  variation 23: /note="the nucleotide in position 23 and the nucleotide in position 22 are linked through a phosphorothiate linkage "
  variation 23: /note="the nucleotide in position 23 and the nucleotide in position 24 are linked through a phosphorothiate linkage "
  variation 24: /note="A in position 24 is a 2'-fluoro-adenosine (fA)"
  variation 24: /note="the nucleotide in position 24 and the nucleotide in position 23 are linked through a phosphorothiate linkage "
tttaacaguguucuugcucuauaa

SEQ ID NO: 40 - RNA, 24 nt, Artificial Sequence
  ss3-11
  variation 1: /note="T in position 1 is a lgT7 analog"
  variation 2: /note="T in position 2 is a lgT7 analog"
  variation 3: /note="T in position 3 is a lgT7 analog"
  variation 4: /note="A in position 4 is a 2'-fluoro-adenosine (fA)"
  variation 5: /note="A in position 5 is a 2'-O-Methyladenosine (mA)"
  variation 6: /note="C in position 6 is a 2'-fluoro-cytidine (fC)"
  variation 7: /note="A in position 7 is a 2'-O-Methyladenosine (mA)"
  variation 8: /note="G in position 8 is a 2'-fluoro-guanosine (fG)"
  variation 9: /note="U in position 9 is a 2'-O-Methyluridine (mU)"
  variation 10: /note="G in position 10 is a 2'-fluoro-guanosine (fG)"
  variation 11: /note="U in position 11 is a 2'-O-Methyluridine (mU)"
  variation 12: /note="U in position 12 is a 2'- fluoro-uridine (fU)"
  variation 13: /note="C in position 13 is a lC4b analog"
  variation 14: /note="U in position 14 is a 2'- fluoro-uridine (fU)"
  variation 15: /note="U in position 15 is a 2'-O-Methyluridine (mU)"
  variation 16: /note="G in position 16 is a 2'-fluoro-guanosine (fG)"
  variation 17: /note="C in position 17 is a 2'-O-Methylcytidine (mC)"
  variation 18: /note="U in position 18 is a 2'- fluoro-uridine (fU)"
  variation 19: /note="C in position 19 is a 2'-O-Methylcytidine (mC)"
  variation 20: /note="U in position 20 is a 2'- fluoro-uridine (fU)"
  variation 21: /note="A in position 21 is a 2'-O-Methyladenosine (mA)"
  variation 22: /note="U in position 22 is a 2'- fluoro-uridine (fU)"
  variation 22: /note="the nucleotide in position 22 and the nucleotide in position 23 are linked through a phosphorothiate linkage "
  variation 23: /note="A in position 23 is a 2'-O-Methyladenosine (mA)"
  variation 23: /note="the nucleotide in position 23 and the nucleotide in position 22 are linked through a phosphorothiate linkage "
  variation 23: /note="the nucleotide in position 23 and the nucleotide in position 24 are linked through a phosphorothiate linkage "
  variation 24: /note="A in position 24 is a 2'-fluoro-adenosine (fA)"
  variation 24: /note="the nucleotide in position 24 and the nucleotide in position 23 are linked through a phosphorothiate linkage "
tttaacaguguucuugcucuauaa

SEQ ID NO: 41 - RNA, 24 nt, Artificial Sequence
  ss3-12
  variation 1: /note="T in position 1 is a lgT7 analog"
  variation 2: /note="T in position 2 is a lgT7 analog"
  variation 3: /note="T in position 3 is a lgT7 analog"
  variation 4: /note="A in position 4 is a 2'-fluoro-adenosine (fA)"
  variation 5: /note="A in position 5 is a 2'-O-Methyladenosine (mA)"
  variation 6: /note="C in position 6 is a 2'-fluoro-cytidine (fC)"
  variation 7: /note="A in position 7 is a 2'-O-Methyladenosine (mA)"
  variation 8: /note="G in position 8 is a 2'-fluoro-guanosine (fG)"
  variation 9: /note="U in position 9 is a 2'-O-Methyluridine (mU)"
  variation 10: /note="G in position 10 is a 2'-fluoro-guanosine (fG)"
  variation 11: /note="U in position 11 is a 2'-O-Methyluridine (mU)"
  variation 12: /note="U in position 12 is a 2'- fluoro-uridine (fU)"
  variation 13: /note="C in position 13 is a 2'-fluoro-cytidine (fC)"
  variation 14: /note="U in position 14 is a lU4b analog"
  variation 15: /note="U in position 15 is a 2'-O-Methyluridine (mU)"
  variation 16: /note="G in position 16 is a 2'-fluoro-guanosine (fG)"
  variation 17: /note="C in position 17 is a 2'-O-Methylcytidine (mC)"
  variation 18: /note="U in position 18 is a 2'- fluoro-uridine (fU)"
  variation 19: /note="C in position 19 is a 2'-O-Methylcytidine (mC)"
  variation 20: /note="U in position 20 is a 2'- fluoro-uridine (fU)"
  variation 21: /note="A in position 21 is a 2'-O-Methyladenosine (mA)"
  variation 22: /note="U in position 22 is a 2'- fluoro-uridine (fU)"
  variation 22: /note="the nucleotide in position 22 and the nucleotide in position 23 are linked through a phosphorothiate linkage "
  variation 23: /note="A in position 23 is a 2'-O-Methyladenosine (mA)"
  variation 23: /note="the nucleotide in position 23 and the nucleotide in position 22 are linked through a phosphorothiate linkage "
  variation 23: /note="the nucleotide in position 23 and the nucleotide in position 24 are linked through a phosphorothiate linkage "
  variation 24: /note="A in position 24 is a 2'-fluoro-adenosine (fA)"
  variation 24: /note="the nucleotide in position 24 and the nucleotide in position 23 are linked through a phosphorothiate linkage "
tttaacaguguucuugcucuauaa

SEQ ID NO: 42 - RNA, 24 nt, Artificial Sequence
  ss3-13
  variation 1: /note="T in position 1 is a lgT7 analog"
  variation 2: /note="T in position 2 is a lgT7 analog"
  variation 3: /note="T in position 3 is a lgT7 analog"
  variation 4: /note="A in position 4 is a 2'-fluoro-adenosine (fA)"
  variation 5: /note="A in position 5 is a 2'-O-Methyladenosine (mA)"
  variation 6: /note="C in position 6 is a 2'-fluoro-cytidine (fC)"
  variation 7: /note="A in position 7 is a 2'-O-Methyladenosine (mA)"
  variation 8: /note="G in position 8 is a 2'-fluoro-guanosine (fG)"
  variation 9: /note="U in position 9 is a 2'-O-Methyluridine (mU)"
  variation 10: /note="G in position 10 is a 2'-fluoro-guanosine (fG)"
  variation 11: /note="U in position 11 is a 2'-O-Methyluridine (mU)"
  variation 12: /note="U in position 12 is a 2'- fluoro-uridine (fU)"
  variation 13: /note="C in position 13 is a 2'-fluoro-cytidine (fC)"
  variation 14: /note="U in position 14 is a 2'- fluoro-uridine (fU)"
  variation 15: /note="U in position 15 is a lU4b analog"
  variation 16: /note="G in position 16 is a 2'-fluoro-guanosine (fG)"
  variation 17: /note="C in position 17 is a 2'-O-Methylcytidine (mC)"
  variation 18: /note="U in position 18 is a 2'- fluoro-uridine (fU)"
  variation 19: /note="C in position 19 is a 2'-O-Methylcytidine (mC)"
  variation 20: /note="U in position 20 is a 2'- fluoro-uridine (fU)"
  variation 21: /note="A in position 21 is a 2'-O-Methyladenosine (mA)"
  variation 22: /note="U in position 22 is a 2'- fluoro-uridine (fU)"
  variation 22: /note="the nucleotide in position 22 and the nucleotide in position 23 are linked through a phosphorothiate linkage "
  variation 23: /note="A in position 23 is a 2'-O-Methyladenosine (mA)"
  variation 23: /note="the nucleotide in position 23 and the nucleotide in position 22 are linked through a phosphorothiate linkage "
  variation 23: /note="the nucleotide in position 23 and the nucleotide in position 24 are linked through a phosphorothiate linkage "
  variation 24: /note="A in position 24 is a 2'-fluoro-adenosine (fA)"
  variation 24: /note="the nucleotide in position 24 and the nucleotide in position 23 are linked through a phosphorothiate linkage "
tttaacaguguucuugcucuauaa

SEQ ID NO: 43 - RNA, 24 nt, Artificial Sequence
  ss3-14
  variation 1: /note="T in position 1 is a lgT7 analog"
  variation 2: /note="T in position 2 is a lgT7 analog"
  variation 3: /note="T in position 3 is a lgT7 analog"
  variation 4: /note="A in position 4 is a 2'-fluoro-adenosine (fA)"
  variation 5: /note="A in position 5 is a 2'-O-Methyladenosine (mA)"
  variation 6: /note="C in position 6 is a 2'-fluoro-cytidine (fC)"
  variation 7: /note="A in position 7 is a 2'-O-Methyladenosine (mA)"
  variation 8: /note="G in position 8 is a 2'-fluoro-guanosine (fG)"
  variation 9: /note="U in position 9 is a 2'-O-Methyluridine (mU)"
  variation 10: /note="G in position 10 is a 2'-fluoro-guanosine (fG)"
  variation 11: /note="U in position 11 is a 2'-O-Methyluridine (mU)"
  variation 12: /note="U in position 12 is a 2'- fluoro-uridine (fU)"
  variation 13: /note="C in position 13 is a 2'-fluoro-cytidine (fC)"
  variation 14: /note="U in position 14 is a 2'- fluoro-uridine (fU)"
  variation 15: /note="U in position 15 is a 2'-O-Methyluridine (mU)"
  variation 16: /note="G in position 16 is a 2'-fluoro-guanosine (fG)"
  variation 17: /note="C in position 17 is a 2'-O-Methylcytidine (mC)"
  variation 18: /note="U in position 18 is a lU4b analog"
  variation 19: /note="C in position 19 is a 2'-O-Methylcytidine (mC)"
  variation 20: /note="U in position 20 is a 2'- fluoro-uridine (fU)"
  variation 21: /note="A in position 21 is a 2'-O-Methyladenosine (mA)"
  variation 22: /note="U in position 22 is a 2'- fluoro-uridine (fU)"
  variation 22: /note="the nucleotide in position 22 and the nucleotide in position 23 are linked through a phosphorothiate linkage "
  variation 23: /note="A in position 23 is a 2'-O-Methyladenosine (mA)"
  variation 23: /note="the nucleotide in position 23 and the nucleotide in position 22 are linked through a phosphorothiate linkage "
  variation 23: /note="the nucleotide in position 23 and the nucleotide in position 24 are linked through a phosphorothiate linkage "
  variation 24: /note="A in position 24 is a 2'-fluoro-adenosine (fA)"
  variation 24: /note="the nucleotide in position 24 and the nucleotide in position 23 are linked through a phosphorothiate linkage "
tttaacaguguucuugcucuauaa

SEQ ID NO: 44 - RNA, 24 nt, Artificial Sequence
  ss3-15
  variation 1: /note="T in position 1 is a lgT7 analog"
  variation 2: /note="T in position 2 is a lgT7 analog"
  variation 3: /note="T in position 3 is a lgT7 analog"
  variation 4: /note="A in position 4 is a 2'-fluoro-adenosine (fA)"
  variation 5: /note="A in position 5 is a 2'-O-Methyladenosine (mA)"
  variation 6: /note="C in position 6 is a 2'-fluoro-cytidine (fC)"
  variation 7: /note="A in position 7 is a 2'-O-Methyladenosine (mA)"
  variation 8: /note="G in position 8 is a 2'-fluoro-guanosine (fG)"
  variation 9: /note="U in position 9 is a 2'-O-Methyluridine (mU)"
  variation 10: /note="G in position 10 is a 2'-fluoro-guanosine (fG)"
  variation 11: /note="U in position 11 is a 2'-O-Methyluridine (mU)"
  variation 12: /note="U in position 12 is a 2'- fluoro-uridine (fU)"
  variation 13: /note="C in position 13 is a 2'-fluoro-cytidine (fC)"
  variation 14: /note="U in position 14 is a 2'- fluoro-uridine (fU)"
  variation 15: /note="U in position 15 is a 2'-O-Methyluridine (mU)"
  variation 16: /note="G in position 16 is a 2'-fluoro-guanosine (fG)"
  variation 17: /note="C in position 17 is a 2'-O-Methylcytidine (mC)"
  variation 18: /note="U in position 18 is a 2'- fluoro-uridine (fU)"
  variation 19: /note="C in position 19 is a lC4b analog"
  variation 20: /note="U in position 20 is a 2'- fluoro-uridine (fU)"
  variation 21: /note="A in position 21 is a 2'-O-Methyladenosine (mA)"
  variation 22: /note="U in position 22 is a 2'- fluoro-uridine (fU)"
  variation 22: /note="the nucleotide in position 22 and the nucleotide in position 23 are linked through a phosphorothiate linkage "
  variation 23: /note="A in position 23 is a 2'-O-Methyladenosine (mA)"
  variation 23: /note="the nucleotide in position 23 and the nucleotide in position 22 are linked through a phosphorothiate linkage "
  variation 23: /note="the nucleotide in position 23 and the nucleotide in position 24 are linked through a phosphorothiate linkage "
  variation 24: /note="A in position 24 is a 2'-fluoro-adenosine (fA)"
  variation 24: /note="the nucleotide in position 24 and the nucleotide in position 23 are linked through a phosphorothiate linkage "
tttaacaguguucuugcucuauaa

SEQ ID NO: 45 - RNA, 24 nt, Artificial Sequence
  ss3-16
  variation 1: /note="T in position 1 is a lgT7 analog"
  variation 2: /note="T in position 2 is a lgT7 analog"
  variation 3: /note="T in position 3 is a lgT7 analog"
  variation 4: /note="A in position 4 is a 2'-fluoro-adenosine (fA)"
  variation 5: /note="A in position 5 is a 2'-O-Methyladenosine (mA)"
  variation 6: /note="C in position 6 is a 2'-fluoro-cytidine (fC)"
  variation 7: /note="A in position 7 is a 2'-O-Methyladenosine (mA)"
  variation 8: /note="G in position 8 is a 2'-fluoro-guanosine (fG)"
  variation 9: /note="U in position 9 is a 2'-O-Methyluridine (mU)"
  variation 10: /note="G in position 10 is a 2'-fluoro-guanosine (fG)"
  variation 11: /note="U in position 11 is a 2'-O-Methyluridine (mU)"
  variation 12: /note="U in position 12 is a 2'- fluoro-uridine (fU)"
  variation 13: /note="C in position 13 is a 2'-fluoro-cytidine (fC)"
  variation 14: /note="U in position 14 is a 2'- fluoro-uridine (fU)"
  variation 15: /note="U in position 15 is a 2'-O-Methyluridine (mU)"
  variation 16: /note="G in position 16 is a 2'-fluoro-guanosine (fG)"
  variation 17: /note="C in position 17 is a 2'-O-Methylcytidine (mC)"
  variation 18: /note="U in position 18 is a 2'- fluoro-uridine (fU)"
  variation 19: /note="C in position 19 is a 2'-O-Methylcytidine (mC)"
  variation 20: /note="U in position 20 is a lU4b analog"
  variation 21: /note="A in position 21 is a 2'-O-Methyladenosine (mA)"
  variation 22: /note="U in position 22 is a 2'- fluoro-uridine (fU)"
  variation 22: /note="the nucleotide in position 22 and the nucleotide in position 23 are linked through a phosphorothiate linkage "
  variation 23: /note="A in position 23 is a 2'-O-Methyladenosine (mA)"
  variation 23: /note="the nucleotide in position 23 and the nucleotide in position 22 are linked through a phosphorothiate linkage "
  variation 23: /note="the nucleotide in position 23 and the nucleotide in position 24 are linked through a phosphorothiate linkage "
  variation 24: /note="A in position 24 is a 2'-fluoro-adenosine (fA)"
  variation 24: /note="the nucleotide in position 24 and the nucleotide in position 23 are linked through a phosphorothiate linkage "
tttaacaguguucuugcucuauaa

SEQ ID NO: 46 - RNA, 24 nt, Artificial Sequence
  ss3-17
  variation 1: /note="T in position 1 is a lgT7 analog"
  variation 2: /note="T in position 2 is a lgT7 analog"
  variation 3: /note="T in position 3 is a lgT7 analog"
  variation 4: /note="A in position 4 is a 2'-fluoro-adenosine (fA)"
  variation 5: /note="A in position 5 is a 2'-O-Methyladenosine (mA)"
  variation 6: /note="C in position 6 is a 2'-fluoro-cytidine (fC)"
  variation 7: /note="A in position 7 is a 2'-O-Methyladenosine (mA)"
  variation 8: /note="G in position 8 is a 2'-fluoro-guanosine (fG)"
  variation 9: /note="U in position 9 is a 2'-O-Methyluridine (mU)"
  variation 10: /note="G in position 10 is a 2'-fluoro-guanosine (fG)"
  variation 11: /note="U in position 11 is a 2'-O-Methyluridine (mU)"
  variation 12: /note="U in position 12 is a 2'- fluoro-uridine (fU)"
  variation 13: /note="C in position 13 is a 2'-fluoro-cytidine (fC)"
  variation 14: /note="U in position 14 is a 2'- fluoro-uridine (fU)"
  variation 15: /note="U in position 15 is a 2'-O-Methyluridine (mU)"
  variation 16: /note="G in position 16 is a 2'-fluoro-guanosine (fG)"
  variation 17: /note="C in position 17 is a 2'-O-Methylcytidine (mC)"
  variation 18: /note="U in position 18 is a 2'- fluoro-uridine (fU)"
  variation 19: /note="C in position 19 is a 2'-O-Methylcytidine (mC)"
  variation 20: /note="U in position 20 is a 2'- fluoro-uridine (fU)"
  variation 21: /note="A in position 21 is a lA4b analog"
  variation 22: /note="U in position 22 is a 2'- fluoro-uridine (fU)"
  variation 22: /note="the nucleotide in position 22 and the nucleotide in position 23 are linked through a phosphorothiate linkage "
  variation 23: /note="A in position 23 is a 2'-O-Methyladenosine (mA)"
  variation 23: /note="the nucleotide in position 23 and the nucleotide in position 22 are linked through a phosphorothiate linkage "
  variation 23: /note="the nucleotide in position 23 and the nucleotide in position 24 are linked through a phosphorothiate linkage "
  variation 24: /note="A in position 24 is a 2'-fluoro-adenosine (fA)"
  variation 24: /note="the nucleotide in position 24 and the nucleotide in position 23 are linked through a phosphorothiate linkage "
tttaacaguguucuugcucuauaa

SEQ ID NO: 47 - RNA, 24 nt, Artificial Sequence
  ss3-18
  variation 1: /note="T in position 1 is a lgT7 analog"
  variation 2: /note="T in position 2 is a lgT7 analog"
  variation 3: /note="T in position 3 is a lgT7 analog"
  variation 4: /note="A in position 4 is a 2'-fluoro-adenosine (fA)"
  variation 5: /note="A in position 5 is a 2'-O-Methyladenosine (mA)"
  variation 6: /note="C in position 6 is a 2'-fluoro-cytidine (fC)"
  variation 7: /note="A in position 7 is a 2'-O-Methyladenosine (mA)"
  variation 8: /note="G in position 8 is a 2'-fluoro-guanosine (fG)"
  variation 9: /note="U in position 9 is a 2'-O-Methyluridine (mU)"
  variation 10: /note="G in position 10 is a 2'-fluoro-guanosine (fG)"
  variation 11: /note="U in position 11 is a 2'-O-Methyluridine (mU)"
  variation 12: /note="U in position 12 is a 2'- fluoro-uridine (fU)"
  variation 13: /note="C in position 13 is a 2'-fluoro-cytidine (fC)"
  variation 14: /note="U in position 14 is a 2'- fluoro-uridine (fU)"
  variation 15: /note="U in position 15 is a 2'-O-Methyluridine (mU)"
  variation 16: /note="G in position 16 is a 2'-fluoro-guanosine (fG)"
  variation 17: /note="C in position 17 is a 2'-O-Methylcytidine (mC)"
  variation 18: /note="U in position 18 is a 2'- fluoro-uridine (fU)"
  variation 19: /note="C in position 19 is a 2'-O-Methylcytidine (mC)"
  variation 20: /note="U in position 20 is a 2'- fluoro-uridine (fU)"
  variation 21: /note="A in position 21 is a 2'-O-Methyladenosine (mA)"
  variation 22: /note="U in position 22 is a 2'- fluoro-uridine (fU)"
  variation 22: /note="the nucleotide in position 22 and the nucleotide in position 23 are linked through a phosphorothiate linkage "
  variation 23: /note="A in position 23 is a lA4b analog"
  variation 23: /note="the nucleotide in position 23 and the nucleotide in position 22 are linked through a phosphorothiate linkage "
  variation 23: /note="the nucleotide in position 23 and the nucleotide in position 24 are linked through a phosphorothiate linkage "
  variation 24: /note="A in position 24 is a 2'-fluoro-adenosine (fA)"
  variation 24: /note="the nucleotide in position 24 and the nucleotide in position 23 are linked through a phosphorothiate linkage "
tttaacaguguucuugcucuauaa

SEQ ID NO: 48 - RNA, 24 nt, Artificial Sequence
  ss3-19
  variation 1: /note="T in position 1 is a lgT7 analog"
  variation 2: /note="T in position 2 is a lgT7 analog"
  variation 3: /note="T in position 3 is a lgT7 analog"
  variation 4: /note="A in position 4 is a 2'-fluoro-adenosine (fA)"
  variation 5: /note="A in position 5 is a 2'-O-Methyladenosine (mA)"
  variation 6: /note="C in position 6 is a 2'-fluoro-cytidine (fC)"
  variation 7: /note="A in position 7 is a 2'-O-Methyladenosine (mA)"
  variation 8: /note="G in position 8 is a 2'-fluoro-guanosine (fG)"
  variation 9: /note="U in position 9 is a 2'-O-Methyluridine (mU)"
  variation 10: /note="G in position 10 is a 2'-fluoro-guanosine (fG)"
  variation 11: /note="U in position 11 is a 2'-O-Methyluridine (mU)"
  variation 12: /note="U in position 12 is a 2'- fluoro-uridine (fU)"
  variation 13: /note="C in position 13 is a 2'-fluoro-cytidine (fC)"
  variation 14: /note="U in position 14 is a 2'- fluoro-uridine (fU)"
  variation 15: /note="U in position 15 is a 2'-O-Methyluridine (mU)"
  variation 16: /note="G in position 16 is a 2'-fluoro-guanosine (fG)"
  variation 17: /note="C in position 17 is a 2'-O-Methylcytidine (mC)"
  variation 18: /note="U in position 18 is a 2'- fluoro-uridine (fU)"
  variation 19: /note="C in position 19 is a 2'-O-Methylcytidine (mC)"
  variation 20: /note="U in position 20 is a 2'- fluoro-uridine (fU)"
  variation 21: /note="A in position 21 is a 2'-O-Methyladenosine (mA)"
  variation 22: /note="U in position 22 is a 2'- fluoro-uridine (fU)"
  variation 22: /note="the nucleotide in position 22 and the nucleotide in position 23 are linked through a phosphorothiate linkage "
  variation 23: /note="A in position 23 is a 2'-O-Methyladenosine (mA)"
  variation 23: /note="the nucleotide in position 23 and the nucleotide in position 22 are linked through a phosphorothiate linkage "
  variation 23: /note="the nucleotide in position 23 and the nucleotide in position 24 are linked through a phosphorothiate linkage "
  variation 24: /note="A in position 24 is a lA4b analog"
  variation 24: /note="the nucleotide in position 24 and the nucleotide in position 23 are linked through a phosphorothiate linkage "
tttaacaguguucuugcucuauaa

SEQ ID NO: 49 - RNA, 24 nt, Artificial Sequence
  ss3-20
  variation 1: /note="T in position 1 is a lgT7 analog"
  variation 2: /note="T in position 2 is a lgT7 analog"
  variation 3: /note="T in position 3 is a lgT7 analog"
  variation 4: /note="A in position 4 is a lA1b analog"
  variation 5: /note="A in position 5 is a 2'-O-Methyladenosine (mA)"
  variation 6: /note="C in position 6 is a 2'-fluoro-cytidine (fC)"
  variation 7: /note="A in position 7 is a 2'-O-Methyladenosine (mA)"
  variation 8: /note="G in position 8 is a 2'-fluoro-guanosine (fG)"
  variation 9: /note="U in position 9 is a 2'-O-Methyluridine (mU)"
  variation 10: /note="G in position 10 is a 2'-fluoro-guanosine (fG)"
  variation 11: /note="U in position 11 is a 2'-O-Methyluridine (mU)"
  variation 12: /note="U in position 12 is a 2'- fluoro-uridine (fU)"
  variation 13: /note="C in position 13 is a 2'-fluoro-cytidine (fC)"
  variation 14: /note="U in position 14 is a 2'- fluoro-uridine (fU)"
  variation 15: /note="U in position 15 is a 2'-O-Methyluridine (mU)"
  variation 16: /note="G in position 16 is a 2'-fluoro-guanosine (fG)"
  variation 17: /note="C in position 17 is a 2'-O-Methylcytidine (mC)"
  variation 18: /note="U in position 18 is a 2'- fluoro-uridine (fU)"
  variation 19: /note="C in position 19 is a 2'-O-Methylcytidine (mC)"
  variation 20: /note="U in position 20 is a 2'- fluoro-uridine (fU)"
  variation 21: /note="A in position 21 is a 2'-O-Methyladenosine (mA)"
  variation 22: /note="U in position 22 is a 2'- fluoro-uridine (fU)"
  variation 22: /note="the nucleotide in position 22 and the nucleotide in position 23 are linked through a phosphorothiate linkage "
  variation 23: /note="A in position 23 is a 2'-O-Methyladenosine (mA)"
  variation 23: /note="the nucleotide in position 23 and the nucleotide in position 22 are linked through a phosphorothiate linkage "
  variation 23: /note="the nucleotide in position 23 and the nucleotide in position 24 are linked through a phosphorothiate linkage "
  variation 24: /note="A in position 24 is a 2'-fluoro-adenosine (fA)"
  variation 24: /note="the nucleotide in position 24 and the nucleotide in position 23 are linked through a phosphorothiate linkage "
tttaacaguguucuugcucuauaa

SEQ ID NO: 50 - RNA, 24 nt, Artificial Sequence
  ss3-21
  variation 1: /note="T in position 1 is a lgT7 analog"
  variation 2: /note="T in position 2 is a lgT7 analog"
  variation 3: /note="T in position 3 is a lgT7 analog"
  variation 4: /note="A in position 4 is a 2'-fluoro-adenosine (fA)"
  variation 5: /note="A in position 5 is a lA1b analog"
  variation 6: /note="C in position 6 is a 2'-fluoro-cytidine (fC)"
  variation 7: /note="A in position 7 is a 2'-O-Methyladenosine (mA)"
  variation 8: /note="G in position 8 is a 2'-fluoro-guanosine (fG)"
  variation 9: /note="U in position 9 is a 2'-O-Methyluridine (mU)"
  variation 10: /note="G in position 10 is a 2'-fluoro-guanosine (fG)"
  variation 11: /note="U in position 11 is a 2'-O-Methyluridine (mU)"
  variation 12: /note="U in position 12 is a 2'- fluoro-uridine (fU)"
  variation 13: /note="C in position 13 is a 2'-fluoro-cytidine (fC)"
  variation 14: /note="U in position 14 is a 2'- fluoro-uridine (fU)"
  variation 15: /note="U in position 15 is a 2'-O-Methyluridine (mU)"
  variation 16: /note="G in position 16 is a 2'-fluoro-guanosine (fG)"
  variation 17: /note="C in position 17 is a 2'-O-Methylcytidine (mC)"
  variation 18: /note="U in position 18 is a 2'- fluoro-uridine (fU)"
  variation 19: /note="C in position 19 is a 2'-O-Methylcytidine (mC)"
  variation 20: /note="U in position 20 is a 2'- fluoro-uridine (fU)"
  variation 21: /note="A in position 21 is a 2'-O-Methyladenosine (mA)"
  variation 22: /note="U in position 22 is a 2'- fluoro-uridine (fU)"
  variation 22: /note="the nucleotide in position 22 and the nucleotide in position 23 are linked through a phosphorothiate linkage "
  variation 23: /note="A in position 23 is a 2'-O-Methyladenosine (mA)"
  variation 23: /note="the nucleotide in position 23 and the nucleotide in position 22 are linked through a phosphorothiate linkage "
  variation 23: /note="the nucleotide in position 23 and the nucleotide in position 24 are linked through a phosphorothiate linkage "
  variation 24: /note="A in position 24 is a 2'-fluoro-adenosine (fA)"
  variation 24: /note="the nucleotide in position 24 and the nucleotide in position 23 are linked through a phosphorothiate linkage "
tttaacaguguucuugcucuauaa

SEQ ID NO: 51 - RNA, 24 nt, Artificial Sequence
  ss3-22
  variation 1: /note="T in position 1 is a lgT7 analog"
  variation 2: /note="T in position 2 is a lgT7 analog"
  variation 3: /note="T in position 3 is a lgT7 analog"
  variation 4: /note="A in position 4 is a 2'-fluoro-adenosine (fA)"
  variation 5: /note="A in position 5 is a 2'-O-Methyladenosine (mA)"
  variation 6: /note="C in position 6 is a lC1b analog"
  variation 7: /note="A in position 7 is a 2'-O-Methyladenosine (mA)"
  variation 8: /note="G in position 8 is a 2'-fluoro-guanosine (fG)"
  variation 9: /note="U in position 9 is a 2'-O-Methyluridine (mU)"
  variation 10: /note="G in position 10 is a 2'-fluoro-guanosine (fG)"
  variation 11: /note="U in position 11 is a 2'-O-Methyluridine (mU)"
  variation 12: /note="U in position 12 is a 2'- fluoro-uridine (fU)"
  variation 13: /note="C in position 13 is a 2'-fluoro-cytidine (fC)"
  variation 14: /note="U in position 14 is a 2'- fluoro-uridine (fU)"
  variation 15: /note="U in position 15 is a 2'-O-Methyluridine (mU)"
  variation 16: /note="G in position 16 is a 2'-fluoro-guanosine (fG)"
  variation 17: /note="C in position 17 is a 2'-O-Methylcytidine (mC)"
  variation 18: /note="U in position 18 is a 2'- fluoro-uridine (fU)"
  variation 19: /note="C in position 19 is a 2'-O-Methylcytidine (mC)"
  variation 20: /note="U in position 20 is a 2'- fluoro-uridine (fU)"
  variation 21: /note="A in position 21 is a 2'-O-Methyladenosine (mA)"
  variation 22: /note="U in position 22 is a 2'- fluoro-uridine (fU)"
  variation 22: /note="the nucleotide in position 22 and the nucleotide in position 23 are linked through a phosphorothiate linkage "
  variation 23: /note="A in position 23 is a 2'-O-Methyladenosine (mA)"
  variation 23: /note="the nucleotide in position 23 and the nucleotide in position 22 are linked through a phosphorothiate linkage "
  variation 23: /note="the nucleotide in position 23 and the nucleotide in position 24 are linked through a phosphorothiate linkage "
  variation 24: /note="A in position 24 is a 2'-fluoro-adenosine (fA)"
  variation 24: /note="the nucleotide in position 24 and the nucleotide in position 23 are linked through a phosphorothiate linkage "
tttaacaguguucuugcucuauaa

SEQ ID NO: 52 - RNA, 24 nt, Artificial Sequence
  ss3-23
  variation 1: /note="T in position 1 is a lgT7 analog"
  variation 2: /note="T in position 2 is a lgT7 analog"
  variation 3: /note="T in position 3 is a lgT7 analog"
  variation 4: /note="A in position 4 is a 2'-fluoro-adenosine (fA)"
  variation 5: /note="A in position 5 is a 2'-O-Methyladenosine (mA)"
  variation 6: /note="C in position 6 is a 2'-fluoro-cytidine (fC)"
  variation 7: /note="A in position 7 is a lA1b analog"
  variation 8: /note="G in position 8 is a 2'-fluoro-guanosine (fG)"
  variation 9: /note="U in position 9 is a 2'-O-Methyluridine (mU)"
  variation 10: /note="G in position 10 is a 2'-fluoro-guanosine (fG)"
  variation 11: /note="U in position 11 is a 2'-O-Methyluridine (mU)"
  variation 12: /note="U in position 12 is a 2'- fluoro-uridine (fU)"
  variation 13: /note="C in position 13 is a 2'-fluoro-cytidine (fC)"
  variation 14: /note="U in position 14 is a 2'- fluoro-uridine (fU)"
  variation 15: /note="U in position 15 is a 2'-O-Methyluridine (mU)"
  variation 16: /note="G in position 16 is a 2'-fluoro-guanosine (fG)"
  variation 17: /note="C in position 17 is a 2'-O-Methylcytidine (mC)"
  variation 18: /note="U in position 18 is a 2'- fluoro-uridine (fU)"
  variation 19: /note="C in position 19 is a 2'-O-Methylcytidine (mC)"
  variation 20: /note="U in position 20 is a 2'- fluoro-uridine (fU)"
  variation 21: /note="A in position 21 is a 2'-O-Methyladenosine (mA)"
  variation 22: /note="U in position 22 is a 2'- fluoro-uridine (fU)"
  variation 22: /note="the nucleotide in position 22 and the nucleotide in position 23 are linked through a phosphorothiate linkage "
  variation 23: /note="A in position 23 is a 2'-O-Methyladenosine (mA)"
  variation 23: /note="the nucleotide in position 23 and the nucleotide in position 22 are linked through a phosphorothiate linkage "
  variation 23: /note="the nucleotide in position 23 and the nucleotide in position 24 are linked through a phosphorothiate linkage "
  variation 24: /note="A in position 24 is a 2'-fluoro-adenosine (fA)"
  variation 24: /note="the nucleotide in position 24 and the nucleotide in position 23 are linked through a phosphorothiate linkage "
tttaacaguguucuugcucuauaa

SEQ ID NO: 53 - RNA, 24 nt, Artificial Sequence
  ss3-24
  variation 1: /note="T in position 1 is a lgT7 analog"
  variation 2: /note="T in position 2 is a lgT7 analog"
  variation 3: /note="T in position 3 is a lgT7 analog"
  variation 4: /note="A in position 4 is a 2'-fluoro-adenosine (fA)"
  variation 5: /note="A in position 5 is a 2'-O-Methyladenosine (mA)"
  variation 6: /note="C in position 6 is a 2'-fluoro-cytidine (fC)"
  variation 7: /note="A in position 7 is a 2'-O-Methyladenosine (mA)"
  variation 8: /note="G in position 8 is a lG1b analog"
  variation 9: /note="U in position 9 is a 2'-O-Methyluridine (mU)"
  variation 10: /note="G in position 10 is a 2'-fluoro-guanosine (fG)"
  variation 11: /note="U in position 11 is a 2'-O-Methyluridine (mU)"
  variation 12: /note="U in position 12 is a 2'- fluoro-uridine (fU)"
  variation 13: /note="C in position 13 is a 2'-fluoro-cytidine (fC)"
  variation 14: /note="U in position 14 is a 2'- fluoro-uridine (fU)"
  variation 15: /note="U in position 15 is a 2'-O-Methyluridine (mU)"
  variation 16: /note="G in position 16 is a 2'-fluoro-guanosine (fG)"
  variation 17: /note="C in position 17 is a 2'-O-Methylcytidine (mC)"
  variation 18: /note="U in position 18 is a 2'- fluoro-uridine (fU)"
  variation 19: /note="C in position 19 is a 2'-O-Methylcytidine (mC)"
  variation 20: /note="U in position 20 is a 2'- fluoro-uridine (fU)"
  variation 21: /note="A in position 21 is a 2'-O-Methyladenosine (mA)"
  variation 22: /note="U in position 22 is a 2'- fluoro-uridine (fU)"
  variation 22: /note="the nucleotide in position 22 and the nucleotide in position 23 are linked through a phosphorothiate linkage "
  variation 23: /note="A in position 23 is a 2'-O-Methyladenosine (mA)"
  variation 23: /note="the nucleotide in position 23 and the nucleotide in position 22 are linked through a phosphorothiate linkage "
  variation 23: /note="the nucleotide in position 23 and the nucleotide in position 24 are linked through a phosphorothiate linkage "
  variation 24: /note="A in position 24 is a 2'-fluoro-adenosine (fA)"
  variation 24: /note="the nucleotide in position 24 and the nucleotide in position 23 are linked through a phosphorothiate linkage "
tttaacaguguucuugcucuauaa

SEQ ID NO: 54 - RNA, 24 nt, Artificial Sequence
  ss3-25
  variation 1: /note="T in position 1 is a lgT7 analog"
  variation 2: /note="T in position 2 is a lgT7 analog"
  variation 3: /note="T in position 3 is a lgT7 analog"
  variation 4: /note="A in position 4 is a 2'-fluoro-adenosine (fA)"
  variation 5: /note="A in position 5 is a 2'-O-Methyladenosine (mA)"
  variation 6: /note="C in position 6 is a 2'-fluoro-cytidine (fC)"
  variation 7: /note="A in position 7 is a 2'-O-Methyladenosine (mA)"
  variation 8: /note="G in position 8 is a 2'-fluoro-guanosine (fG)"
  variation 9: /note="A in position 9 is a lA1b analog"
  variation 10: /note="G in position 10 is a 2'-fluoro-guanosine (fG)"
  variation 11: /note="U in position 11 is a 2'-O-Methyluridine (mU)"
  variation 12: /note="U in position 12 is a 2'- fluoro-uridine (fU)"
  variation 13: /note="C in position 13 is a 2'-fluoro-cytidine (fC)"
  variation 14: /note="U in position 14 is a 2'- fluoro-uridine (fU)"
  variation 15: /note="U in position 15 is a 2'-O-Methyluridine (mU)"
  variation 16: /note="G in position 16 is a 2'-fluoro-guanosine (fG)"
  variation 17: /note="C in position 17 is a 2'-O-Methylcytidine (mC)"
  variation 18: /note="U in position 18 is a 2'- fluoro-uridine (fU)"
  variation 19: /note="C in position 19 is a 2'-O-Methylcytidine (mC)"
  variation 20: /note="U in position 20 is a 2'- fluoro-uridine (fU)"
  variation 21: /note="A in position 21 is a 2'-O-Methyladenosine (mA)"
  variation 22: /note="U in position 22 is a 2'- fluoro-uridine (fU)"
  variation 22: /note="the nucleotide in position 22 and the nucleotide in position 23 are linked through a phosphorothiate linkage "
  variation 23: /note="A in position 23 is a 2'-O-Methyladenosine (mA)"
  variation 23: /note="the nucleotide in position 23 and the nucleotide in position 22 are linked through a phosphorothiate linkage "
  variation 23: /note="the nucleotide in position 23 and the nucleotide in position 24 are linked through a phosphorothiate linkage "
  variation 24: /note="A in position 24 is a 2'-fluoro-adenosine (fA)"
  variation 24: /note="the nucleotide in position 24 and the nucleotide in position 23 are linked through a phosphorothiate linkage "
tttaacaguguucuugcucuauaa

SEQ ID NO: 55 - RNA, 24 nt, Artificial Sequence
  ss3-26
  variation 1: /note="T in position 1 is a lgT7 analog"
  variation 2: /note="T in position 2 is a lgT7 analog"
  variation 3: /note="T in position 3 is a lgT7 analog"
  variation 4: /note="A in position 4 is a 2'-fluoro-adenosine (fA)"
  variation 5: /note="A in position 5 is a 2'-O-Methyladenosine (mA)"
  variation 6: /note="C in position 6 is a 2'-fluoro-cytidine (fC)"
  variation 7: /note="A in position 7 is a 2'-O-Methyladenosine (mA)"
  variation 8: /note="G in position 8 is a 2'-fluoro-guanosine (fG)"
  variation 9: /note="U in position 9 is a 2'-O-Methyluridine (mU)"
  variation 10: /note="G in position 10 is a lG1b analog"
  variation 11: /note="U in position 11 is a 2'-O-Methyluridine (mU)"
  variation 12: /note="U in position 12 is a 2'- fluoro-uridine (fU)"
  variation 13: /note="C in position 13 is a 2'-fluoro-cytidine (fC)"
  variation 14: /note="U in position 14 is a 2'- fluoro-uridine (fU)"
  variation 15: /note="U in position 15 is a 2'-O-Methyluridine (mU)"
  variation 16: /note="G in position 16 is a 2'-fluoro-guanosine (fG)"
  variation 17: /note="C in position 17 is a 2'-O-Methylcytidine (mC)"
  variation 18: /note="U in position 18 is a 2'- fluoro-uridine (fU)"
  variation 19: /note="C in position 19 is a 2'-O-Methylcytidine (mC)"
  variation 20: /note="U in position 20 is a 2'- fluoro-uridine (fU)"
  variation 21: /note="A in position 21 is a 2'-O-Methyladenosine (mA)"
  variation 22: /note="U in position 22 is a 2'- fluoro-uridine (fU)"
  variation 22: /note="the nucleotide in position 22 and the nucleotide in position 23 are linked through a phosphorothiate linkage "
  variation 23: /note="A in position 23 is a 2'-O-Methyladenosine (mA)"
  variation 23: /note="the nucleotide in position 23 and the nucleotide in position 22 are linked through a phosphorothiate linkage "
  variation 23: /note="the nucleotide in position 23 and the nucleotide in position 24 are linked through a phosphorothiate linkage "
  variation 24: /note="A in position 24 is a 2'-fluoro-adenosine (fA)"
  variation 24: /note="the nucleotide in position 24 and the nucleotide in position 23 are linked through a phosphorothiate linkage "
tttaacaguguucuugcucuauaa

SEQ ID NO: 56 - RNA, 24 nt, Artificial Sequence
  ss3-27
  variation 1: /note="T in position 1 is a lgT7 analog"
  variation 2: /note="T in position 2 is a lgT7 analog"
  variation 3: /note="T in position 3 is a lgT7 analog"
  variation 4: /note="A in position 4 is a 2'-fluoro-adenosine (fA)"
  variation 5: /note="A in position 5 is a 2'-O-Methyladenosine (mA)"
  variation 6: /note="C in position 6 is a 2'-fluoro-cytidine (fC)"
  variation 7: /note="A in position 7 is a 2'-O-Methyladenosine (mA)"
  variation 8: /note="G in position 8 is a 2'-fluoro-guanosine (fG)"
  variation 9: /note="U in position 9 is a 2'-O-Methyluridine (mU)"
  variation 10: /note="G in position 10 is a 2'-fluoro-guanosine (fG)"
  variation 11: /note="U in position 11 is a lU1b analog"
  variation 12: /note="U in position 12 is a 2'- fluoro-uridine (fU)"
  variation 13: /note="C in position 13 is a 2'-fluoro-cytidine (fC)"
  variation 14: /note="U in position 14 is a 2'- fluoro-uridine (fU)"
  variation 15: /note="U in position 15 is a 2'-O-Methyluridine (mU)"
  variation 16: /note="G in position 16 is a 2'-fluoro-guanosine (fG)"
  variation 17: /note="C in position 17 is a 2'-O-Methylcytidine (mC)"
  variation 18: /note="U in position 18 is a 2'- fluoro-uridine (fU)"
  variation 19: /note="C in position 19 is a 2'-O-Methylcytidine (mC)"
  variation 20: /note="U in position 20 is a 2'- fluoro-uridine (fU)"
  variation 21: /note="A in position 21 is a 2'-O-Methyladenosine (mA)"
  variation 22: /note="U in position 22 is a 2'- fluoro-uridine (fU)"
  variation 22: /note="the nucleotide in position 22 and the nucleotide in position 23 are linked through a phosphorothiate linkage "
  variation 23: /note="A in position 23 is a 2'-O-Methyladenosine (mA)"
  variation 23: /note="the nucleotide in position 23 and the nucleotide in position 22 are linked through a phosphorothiate linkage "
  variation 23: /note="the nucleotide in position 23 and the nucleotide in position 24 are linked through a phosphorothiate linkage "
  variation 24: /note="A in position 24 is a 2'-fluoro-adenosine (fA)"
  variation 24: /note="the nucleotide in position 24 and the nucleotide in position 23 are linked through a phosphorothiate linkage "
tttaacaguguucuugcucuauaa

SEQ ID NO: 57 - RNA, 24 nt, Artificial Sequence
  ss3-28
  variation 1: /note="T in position 1 is a lgT7 analog"
  variation 2: /note="T in position 2 is a lgT7 analog"
  variation 3: /note="T in position 3 is a lgT7 analog"
  variation 4: /note="A in position 4 is a 2'-fluoro-adenosine (fA)"
  variation 5: /note="A in position 5 is a 2'-O-Methyladenosine (mA)"
  variation 6: /note="C in position 6 is a 2'-fluoro-cytidine (fC)"
  variation 7: /note="A in position 7 is a 2'-O-Methyladenosine (mA)"
  variation 8: /note="G in position 8 is a 2'-fluoro-guanosine (fG)"
  variation 9: /note="U in position 9 is a 2'-O-Methyluridine (mU)"
  variation 10: /note="G in position 10 is a 2'-fluoro-guanosine (fG)"
  variation 11: /note="U in position 11 is a 2'-O-Methyluridine (mU)"
  variation 12: /note="U in position 12 is a lU1b analog"
  variation 13: /note="C in position 13 is a 2'-fluoro-cytidine (fC)"
  variation 14: /note="U in position 14 is a 2'- fluoro-uridine (fU)"
  variation 15: /note="U in position 15 is a 2'-O-Methyluridine (mU)"
  variation 16: /note="G in position 16 is a 2'-fluoro-guanosine (fG)"
  variation 17: /note="C in position 17 is a 2'-O-Methylcytidine (mC)"
  variation 18: /note="U in position 18 is a 2'- fluoro-uridine (fU)"
  variation 19: /note="C in position 19 is a 2'-O-Methylcytidine (mC)"
  variation 20: /note="U in position 20 is a 2'- fluoro-uridine (fU)"
  variation 21: /note="A in position 21 is a 2'-O-Methyladenosine (mA)"
  variation 22: /note="U in position 22 is a 2'- fluoro-uridine (fU)"
  variation 22: /note="the nucleotide in position 22 and the nucleotide in position 23 are linked through a phosphorothiate linkage "
  variation 23: /note="A in position 23 is a 2'-O-Methyladenosine (mA)"
  variation 23: /note="the nucleotide in position 23 and the nucleotide in position 22 are linked through a phosphorothiate linkage "
  variation 23: /note="the nucleotide in position 23 and the nucleotide in position 24 are linked through a phosphorothiate linkage "
  variation 24: /note="A in position 24 is a 2'-fluoro-adenosine (fA)"
  variation 24: /note="the nucleotide in position 24 and the nucleotide in position 23 are linked through a phosphorothiate linkage "
tttaacaguguucuugcucuauaa

SEQ ID NO: 58 - RNA, 24 nt, Artificial Sequence
  ss3-29
  variation 1: /note="T in position 1 is a lgT7 analog"
  variation 2: /note="T in position 2 is a lgT7 analog"
  variation 3: /note="T in position 3 is a lgT7 analog"
  variation 4: /note="A in position 4 is a 2'-fluoro-adenosine (fA)"
  variation 5: /note="A in position 5 is a 2'-O-Methyladenosine (mA)"
  variation 6: /note="C in position 6 is a 2'-fluoro-cytidine (fC)"
  variation 7: /note="A in position 7 is a 2'-O-Methyladenosine (mA)"
  variation 8: /note="G in position 8 is a 2'-fluoro-guanosine (fG)"
  variation 9: /note="U in position 9 is a 2'-O-Methyluridine (mU)"
  variation 10: /note="G in position 10 is a 2'-fluoro-guanosine (fG)"
  variation 11: /note="U in position 11 is a 2'-O-Methyluridine (mU)"
  variation 12: /note="U in position 12 is a 2'- fluoro-uridine (fU)"
  variation 13: /note="C in position 13 is a lC1b analog"
  variation 14: /note="U in position 14 is a 2'- fluoro-uridine (fU)"
  variation 15: /note="U in position 15 is a 2'-O-Methyluridine (mU)"
  variation 16: /note="G in position 16 is a 2'-fluoro-guanosine (fG)"
  variation 17: /note="C in position 17 is a 2'-O-Methylcytidine (mC)"
  variation 18: /note="U in position 18 is a 2'- fluoro-uridine (fU)"
  variation 19: /note="C in position 19 is a 2'-O-Methylcytidine (mC)"
  variation 20: /note="U in position 20 is a 2'- fluoro-uridine (fU)"
  variation 21: /note="A in position 21 is a 2'-O-Methyladenosine (mA)"
  variation 22: /note="U in position 22 is a 2'- fluoro-uridine (fU)"
  variation 22: /note="the nucleotide in position 22 and the nucleotide in position 23 are linked through a phosphorothiate linkage "
  variation 23: /note="A in position 23 is a 2'-O-Methyladenosine (mA)"
  variation 23: /note="the nucleotide in position 23 and the nucleotide in position 22 are linked through a phosphorothiate linkage "
  variation 23: /note="the nucleotide in position 23 and the nucleotide in position 24 are linked through a phosphorothiate linkage "
  variation 24: /note="A in position 24 is a 2'-fluoro-adenosine (fA)"
  variation 24: /note="the nucleotide in position 24 and the nucleotide in position 23 are linked through a phosphorothiate linkage "
tttaacaguguucuugcucuauaa

SEQ ID NO: 59 - RNA, 24 nt, Artificial Sequence
  ss3-30
  variation 1: /note="T in position 1 is a lgT7 analog"
  variation 2: /note="T in position 2 is a lgT7 analog"
  variation 3: /note="T in position 3 is a lgT7 analog"
  variation 4: /note="A in position 4 is a 2'-fluoro-adenosine (fA)"
  variation 5: /note="A in position 5 is a 2'-O-Methyladenosine (mA)"
  variation 6: /note="C in position 6 is a 2'-fluoro-cytidine (fC)"
  variation 7: /note="A in position 7 is a 2'-O-Methyladenosine (mA)"
  variation 8: /note="G in position 8 is a 2'-fluoro-guanosine (fG)"
  variation 9: /note="U in position 9 is a 2'-O-Methyluridine (mU)"
  variation 10: /note="G in position 10 is a 2'-fluoro-guanosine (fG)"
  variation 11: /note="U in position 11 is a 2'-O-Methyluridine (mU)"
  variation 12: /note="U in position 12 is a 2'- fluoro-uridine (fU)"
  variation 13: /note="C in position 13 is a 2'-fluoro-cytidine (fC)"
  variation 14: /note="U in position 14 is a lU1b analog"
  variation 15: /note="U in position 15 is a 2'-O-Methyluridine (mU)"
  variation 16: /note="G in position 16 is a 2'-fluoro-guanosine (fG)"
  variation 17: /note="C in position 17 is a 2'-O-Methylcytidine (mC)"
  variation 18: /note="U in position 18 is a 2'- fluoro-uridine (fU)"
  variation 19: /note="C in position 19 is a 2'-O-Methylcytidine (mC)"
  variation 20: /note="U in position 20 is a 2'- fluoro-uridine (fU)"
  variation 21: /note="A in position 21 is a 2'-O-Methyladenosine (mA)"
  variation 22: /note="U in position 22 is a 2'- fluoro-uridine (fU)"
  variation 22: /note="the nucleotide in position 22 and the nucleotide in position 23 are linked through a phosphorothiate linkage "
  variation 23: /note="A in position 23 is a 2'-O-Methyladenosine (mA)"
  variation 23: /note="the nucleotide in position 23 and the nucleotide in position 22 are linked through a phosphorothiate linkage "
  variation 23: /note="the nucleotide in position 23 and the nucleotide in position 24 are linked through a phosphorothiate linkage "
  variation 24: /note="A in position 24 is a 2'-fluoro-adenosine (fA)"
  variation 24: /note="the nucleotide in position 24 and the nucleotide in position 23 are linked through a phosphorothiate linkage "
tttaacaguguucuugcucuauaa

SEQ ID NO: 60 - RNA, 24 nt, Artificial Sequence
  ss3-31
  variation 1: /note="T in position 1 is a lgT7 analog"
  variation 2: /note="T in position 2 is a lgT7 analog"
  variation 3: /note="T in position 3 is a lgT7 analog"
  variation 4: /note="A in position 4 is a 2'-fluoro-adenosine (fA)"
  variation 5: /note="A in position 5 is a 2'-O-Methyladenosine (mA)"
  variation 6: /note="C in position 6 is a 2'-fluoro-cytidine (fC)"
  variation 7: /note="A in position 7 is a 2'-O-Methyladenosine (mA)"
  variation 8: /note="G in position 8 is a 2'-fluoro-guanosine (fG)"
  variation 9: /note="U in position 9 is a 2'-O-Methyluridine (mU)"
  variation 10: /note="G in position 10 is a 2'-fluoro-guanosine (fG)"
  variation 11: /note="U in position 11 is a 2'-O-Methyluridine (mU)"
  variation 12: /note="U in position 12 is a 2'- fluoro-uridine (fU)"
  variation 13: /note="C in position 13 is a 2'-fluoro-cytidine (fC)"
  variation 14: /note="U in position 14 is a 2'- fluoro-uridine (fU)"
  variation 15: /note="U in position 15 is a 2'-O-Methyluridine (mU)"
  variation 16: /note="G in position 16 is a lG1b analog"
  variation 17: /note="C in position 17 is a 2'-O-Methylcytidine (mC)"
  variation 18: /note="U in position 18 is a 2'- fluoro-uridine (fU)"
  variation 19: /note="C in position 19 is a 2'-O-Methylcytidine (mC)"
  variation 20: /note="U in position 20 is a 2'- fluoro-uridine (fU)"
  variation 21: /note="A in position 21 is a 2'-O-Methyladenosine (mA)"
  variation 22: /note="U in position 22 is a 2'- fluoro-uridine (fU)"
  variation 22: /note="the nucleotide in position 22 and the nucleotide in position 23 are linked through a phosphorothiate linkage "
  variation 23: /note="A in position 23 is a 2'-O-Methyladenosine (mA)"
  variation 23: /note="the nucleotide in position 23 and the nucleotide in position 22 are linked through a phosphorothiate linkage "
  variation 23: /note="the nucleotide in position 23 and the nucleotide in position 24 are linked through a phosphorothiate linkage "
  variation 24: /note="A in position 24 is a 2'-fluoro-adenosine (fA)"
  variation 24: /note="the nucleotide in position 24 and the nucleotide in position 23 are linked through a phosphorothiate linkage "
tttaacaguguucuugcucuauaa

SEQ ID NO: 61 - RNA, 24 nt, Artificial Sequence
  ss3-22
  variation 1: /note="T in position 1 is a lgT7 analog"
  variation 2: /note="T in position 2 is a lgT7 analog"
  variation 3: /note="T in position 3 is a lgT7 analog"
  variation 4: /note="A in position 4 is a 2'-fluoro-adenosine (fA)"
  variation 5: /note="A in position 5 is a 2'-O-Methyladenosine (mA)"
  variation 6: /note="C in position 6 is a 2'-fluoro-cytidine (fC)"
  variation 7: /note="A in position 7 is a 2'-O-Methyladenosine (mA)"
  variation 8: /note="G in position 8 is a 2'-fluoro-guanosine (fG)"
  variation 9: /note="U in position 9 is a 2'-O-Methyluridine (mU)"
  variation 10: /note="G in position 10 is a 2'-fluoro-guanosine (fG)"
  variation 11: /note="U in position 11 is a 2'-O-Methyluridine (mU)"
  variation 12: /note="U in position 12 is a 2'- fluoro-uridine (fU)"
  variation 13: /note="C in position 13 is a 2'-fluoro-cytidine (fC)"
  variation 14: /note="U in position 14 is a 2'- fluoro-uridine (fU)"
  variation 15: /note="U in position 15 is a 2'-O-Methyluridine (mU)"
  variation 16: /note="G in position 16 is a 2'-fluoro-guanosine (fG)"
  variation 17: /note="C in position 17 is a lC1b analog"
  variation 18: /note="U in position 18 is a 2'- fluoro-uridine (fU)"
  variation 19: /note="C in position 19 is a 2'-O-Methylcytidine (mC)"
  variation 20: /note="U in position 20 is a 2'- fluoro-uridine (fU)"
  variation 21: /note="A in position 21 is a 2'-O-Methyladenosine (mA)"
  variation 22: /note="U in position 22 is a 2'- fluoro-uridine (fU)"
  variation 22: /note="the nucleotide in position 22 and the nucleotide in position 23 are linked through a phosphorothiate linkage "
  variation 23: /note="A in position 23 is a 2'-O-Methyladenosine (mA)"
  variation 23: /note="the nucleotide in position 23 and the nucleotide in position 22 are linked through a phosphorothiate linkage "
  variation 23: /note="the nucleotide in position 23 and the nucleotide in position 24 are linked through a phosphorothiate linkage "
  variation 24: /note="A in position 24 is a 2'-fluoro-adenosine (fA)"
  variation 24: /note="the nucleotide in position 24 and the nucleotide in position 23 are linked through a phosphorothiate linkage "
tttaacaguguucuugcucuauaa

SEQ ID NO: 62 - RNA, 24 nt, Artificial Sequence
  ss3-33
  variation 1: /note="T in position 1 is a lgT7 analog"
  variation 2: /note="T in position 2 is a lgT7 analog"
  variation 3: /note="T in position 3 is a lgT7 analog"
  variation 4: /note="A in position 4 is a 2'-fluoro-adenosine (fA)"
  variation 5: /note="A in position 5 is a 2'-O-Methyladenosine (mA)"
  variation 6: /note="C in position 6 is a 2'-fluoro-cytidine (fC)"
  variation 7: /note="A in position 7 is a 2'-O-Methyladenosine (mA)"
  variation 8: /note="G in position 8 is a 2'-fluoro-guanosine (fG)"
  variation 9: /note="U in position 9 is a 2'-O-Methyluridine (mU)"
  variation 10: /note="G in position 10 is a 2'-fluoro-guanosine (fG)"
  variation 11: /note="U in position 11 is a 2'-O-Methyluridine (mU)"
  variation 12: /note="U in position 12 is a 2'- fluoro-uridine (fU)"
  variation 13: /note="C in position 13 is a 2'-fluoro-cytidine (fC)"
  variation 14: /note="U in position 14 is a 2'- fluoro-uridine (fU)"
  variation 15: /note="U in position 15 is a 2'-O-Methyluridine (mU)"
  variation 16: /note="G in position 16 is a 2'-fluoro-guanosine (fG)"
  variation 17: /note="C in position 17 is a 2'-O-Methylcytidine (mC)"
  variation 18: /note="U in position 18 is a lU1b analog"
  variation 19: /note="C in position 19 is a 2'-O-Methylcytidine (mC)"
  variation 20: /note="U in position 20 is a 2'- fluoro-uridine (fU)"
  variation 21: /note="A in position 21 is a 2'-O-Methyladenosine (mA)"
  variation 22: /note="U in position 22 is a 2'- fluoro-uridine (fU)"
  variation 22: /note="the nucleotide in position 22 and the nucleotide in position 23 are linked through a phosphorothiate linkage "
  variation 23: /note="A in position 23 is a 2'-O-Methyladenosine (mA)"
  variation 23: /note="the nucleotide in position 23 and the nucleotide in position 22 are linked through a phosphorothiate linkage "
  variation 23: /note="the nucleotide in position 23 and the nucleotide in position 24 are linked through a phosphorothiate linkage "
  variation 24: /note="A in position 24 is a 2'-fluoro-adenosine (fA)"
  variation 24: /note="the nucleotide in position 24 and the nucleotide in position 23 are linked through a phosphorothiate linkage "
tttaacaguguucuugcucuauaa

SEQ ID NO: 63 - RNA, 24 nt, Artificial Sequence
  ss3-24
  variation 1: /note="T in position 1 is a lgT7 analog"
  variation 2: /note="T in position 2 is a lgT7 analog"
  variation 3: /note="T in position 3 is a lgT7 analog"
  variation 4: /note="A in position 4 is a 2'-fluoro-adenosine (fA)"
  variation 5: /note="A in position 5 is a 2'-O-Methyladenosine (mA)"
  variation 6: /note="C in position 6 is a 2'-fluoro-cytidine (fC)"
  variation 7: /note="A in position 7 is a 2'-O-Methyladenosine (mA)"
  variation 8: /note="G in position 8 is a 2'-fluoro-guanosine (fG)"
  variation 9: /note="U in position 9 is a 2'-O-Methyluridine (mU)"
  variation 10: /note="G in position 10 is a 2'-fluoro-guanosine (fG)"
  variation 11: /note="U in position 11 is a 2'-O-Methyluridine (mU)"
  variation 12: /note="U in position 12 is a 2'- fluoro-uridine (fU)"
  variation 13: /note="C in position 13 is a 2'-fluoro-cytidine (fC)"
  variation 14: /note="U in position 14 is a 2'- fluoro-uridine (fU)"
  variation 15: /note="U in position 15 is a 2'-O-Methyluridine (mU)"
  variation 16: /note="G in position 16 is a 2'-fluoro-guanosine (fG)"
  variation 17: /note="C in position 17 is a 2'-O-Methylcytidine (mC)"
  variation 18: /note="U in position 18 is a 2'- fluoro-uridine (fU)"
  variation 19: /note="C in position 19 is a lC1b analog"
  variation 20: /note="U in position 20 is a 2'- fluoro-uridine (fU)"
  variation 21: /note="A in position 21 is a 2'-O-Methyladenosine (mA)"
  variation 22: /note="U in position 22 is a 2'- fluoro-uridine (fU)"
  variation 22: /note="the nucleotide in position 22 and the nucleotide in position 23 are linked through a phosphorothiate linkage "
  variation 23: /note="A in position 23 is a 2'-O-Methyladenosine (mA)"
  variation 23: /note="the nucleotide in position 23 and the nucleotide in position 22 are linked through a phosphorothiate linkage "
  variation 23: /note="the nucleotide in position 23 and the nucleotide in position 24 are linked through a phosphorothiate linkage "
  variation 24: /note="A in position 24 is a 2'-fluoro-adenosine (fA)"
  variation 24: /note="the nucleotide in position 24 and the nucleotide in position 23 are linked through a phosphorothiate linkage "
tttaacaguguucuugcucuauaa

SEQ ID NO: 64 - RNA, 24 nt, Artificial Sequence
  ss3-35
  variation 1: /note="T in position 1 is a lgT7 analog"
  variation 2: /note="T in position 2 is a lgT7 analog"
  variation 3: /note="T in position 3 is a lgT7 analog"
  variation 4: /note="A in position 4 is a 2'-fluoro-adenosine (fA)"
  variation 5: /note="A in position 5 is a 2'-O-Methyladenosine (mA)"
  variation 6: /note="C in position 6 is a 2'-fluoro-cytidine (fC)"
  variation 7: /note="A in position 7 is a 2'-O-Methyladenosine (mA)"
  variation 8: /note="G in position 8 is a 2'-fluoro-guanosine (fG)"
  variation 9: /note="U in position 9 is a 2'-O-Methyluridine (mU)"
  variation 10: /note="G in position 10 is a 2'-fluoro-guanosine (fG)"
  variation 11: /note="U in position 11 is a 2'-O-Methyluridine (mU)"
  variation 12: /note="U in position 12 is a 2'- fluoro-uridine (fU)"
  variation 13: /note="C in position 13 is a 2'-fluoro-cytidine (fC)"
  variation 14: /note="U in position 14 is a 2'- fluoro-uridine (fU)"
  variation 15: /note="U in position 15 is a 2'-O-Methyluridine (mU)"
  variation 16: /note="G in position 16 is a 2'-fluoro-guanosine (fG)"
  variation 17: /note="C in position 17 is a 2'-O-Methylcytidine (mC)"
  variation 18: /note="U in position 18 is a 2'- fluoro-uridine (fU)"
  variation 19: /note="C in position 19 is a 2'-O-Methylcytidine (mC)"
  variation 20: /note="U in position 20 is a lU1b analog"
  variation 21: /note="A in position 21 is a 2'-O-Methyladenosine (mA)"
  variation 22: /note="U in position 22 is a 2'- fluoro-uridine (fU)"
  variation 22: /note="the nucleotide in position 22 and the nucleotide in position 23 are linked through a phosphorothiate linkage "
  variation 23: /note="A in position 23 is a 2'-O-Methyladenosine (mA)"
  variation 23: /note="the nucleotide in position 23 and the nucleotide in position 22 are linked through a phosphorothiate linkage "
  variation 23: /note="the nucleotide in position 23 and the nucleotide in position 24 are linked through a phosphorothiate linkage "
  variation 24: /note="A in position 24 is a 2'-fluoro-adenosine (fA)"
  variation 24: /note="the nucleotide in position 24 and the nucleotide in position 23 are linked through a phosphorothiate linkage "
tttaacaguguucuugcucuauaa

SEQ ID NO: 65 - RNA, 24 nt, Artificial Sequence
  ss3-36
  variation 1: /note="T in position 1 is a lgT7 analog"
  variation 2: /note="T in position 2 is a lgT7 analog"
  variation 3: /note="T in position 3 is a lgT7 analog"
  variation 4: /note="A in position 4 is a 2'-fluoro-adenosine (fA)"
  variation 5: /note="A in position 5 is a 2'-O-Methyladenosine (mA)"
  variation 6: /note="C in position 6 is a 2'-fluoro-cytidine (fC)"
  variation 7: /note="A in position 7 is a 2'-O-Methyladenosine (mA)"
  variation 8: /note="G in position 8 is a 2'-fluoro-guanosine (fG)"
  variation 9: /note="U in position 9 is a 2'-O-Methyluridine (mU)"
  variation 10: /note="G in position 10 is a 2'-fluoro-guanosine (fG)"
  variation 11: /note="U in position 11 is a 2'-O-Methyluridine (mU)"
  variation 12: /note="U in position 12 is a 2'- fluoro-uridine (fU)"
  variation 13: /note="C in position 13 is a 2'-fluoro-cytidine (fC)"
  variation 14: /note="U in position 14 is a 2'- fluoro-uridine (fU)"
  variation 15: /note="U in position 15 is a 2'-O-Methyluridine (mU)"
  variation 16: /note="G in position 16 is a 2'-fluoro-guanosine (fG)"
  variation 17: /note="C in position 17 is a 2'-O-Methylcytidine (mC)"
  variation 18: /note="U in position 18 is a 2'- fluoro-uridine (fU)"
  variation 19: /note="C in position 19 is a 2'-O-Methylcytidine (mC)"
  variation 20: /note="U in position 20 is a 2'- fluoro-uridine (fU)"
  variation 21: /note="A in position 21 is a lA1b analog"
  variation 22: /note="U in position 22 is a 2'- fluoro-uridine (fU)"
  variation 22: /note="the nucleotide in position 22 and the nucleotide in position 23 are linked through a phosphorothiate linkage "
  variation 23: /note="A in position 23 is a 2'-O-Methyladenosine (mA)"
  variation 23: /note="the nucleotide in position 23 and the nucleotide in position 22 are linked through a phosphorothiate linkage "
  variation 23: /note="the nucleotide in position 23 and the nucleotide in position 24 are linked through a phosphorothiate linkage "
  variation 24: /note="A in position 24 is a 2'-fluoro-adenosine (fA)"
  variation 24: /note="the nucleotide in position 24 and the nucleotide in position 23 are linked through a phosphorothiate linkage "
tttaacaguguucuugcucuauaa

SEQ ID NO: 66 - RNA, 24 nt, Artificial Sequence
  ss3-37
  variation 1: /note="T in position 1 is a lgT7 analog"
  variation 2: /note="T in position 2 is a lgT7 analog"
  variation 3: /note="T in position 3 is a lgT7 analog"
  variation 4: /note="A in position 4 is a 2'-fluoro-adenosine (fA)"
  variation 5: /note="A in position 5 is a 2'-O-Methyladenosine (mA)"
  variation 6: /note="C in position 6 is a 2'-fluoro-cytidine (fC)"
  variation 7: /note="A in position 7 is a 2'-O-Methyladenosine (mA)"
  variation 8: /note="G in position 8 is a 2'-fluoro-guanosine (fG)"
  variation 9: /note="U in position 9 is a 2'-O-Methyluridine (mU)"
  variation 10: /note="G in position 10 is a 2'-fluoro-guanosine (fG)"
  variation 11: /note="U in position 11 is a 2'-O-Methyluridine (mU)"
  variation 12: /note="U in position 12 is a 2'- fluoro-uridine (fU)"
  variation 13: /note="C in position 13 is a 2'-fluoro-cytidine (fC)"
  variation 14: /note="U in position 14 is a 2'- fluoro-uridine (fU)"
  variation 15: /note="U in position 15 is a 2'-O-Methyluridine (mU)"
  variation 16: /note="G in position 16 is a 2'-fluoro-guanosine (fG)"
  variation 17: /note="C in position 17 is a 2'-O-Methylcytidine (mC)"
  variation 18: /note="U in position 18 is a 2'- fluoro-uridine (fU)"
  variation 19: /note="C in position 19 is a 2'-O-Methylcytidine (mC)"
  variation 20: /note="U in position 20 is a 2'- fluoro-uridine (fU)"
  variation 21: /note="A in position 21 is a 2'-O-Methyladenosine (mA)"
  variation 22: /note="U in position 22 is a lU1b analog"
  variation 22: /note="the nucleotide in position 22 and the nucleotide in position 23 are linked through a phosphorothiate linkage "
  variation 23: /note="A in position 23 is a 2'-O-Methyladenosine (mA)"
  variation 23: /note="the nucleotide in position 23 and the nucleotide in position 22 are linked through a phosphorothiate linkage "
  variation 23: /note="the nucleotide in position 23 and the nucleotide in position 24 are linked through a phosphorothiate linkage "
  variation 24: /note="A in position 24 is a 2'-fluoro-adenosine (fA)"
  variation 24: /note="the nucleotide in position 24 and the nucleotide in position 23 are linked through a phosphorothiate linkage "
tttaacaguguucuugcucuauaa

SEQ ID NO: 67 - RNA, 24 nt, Artificial Sequence
  ss3-38
  variation 1: /note="T in position 1 is a lgT7 analog"
  variation 2: /note="T in position 2 is a lgT7 analog"
  variation 3: /note="T in position 3 is a lgT7 analog"
  variation 4: /note="A in position 4 is a 2'-fluoro-adenosine (fA)"
  variation 5: /note="A in position 5 is a 2'-O-Methyladenosine (mA)"
  variation 6: /note="C in position 6 is a 2'-fluoro-cytidine (fC)"
  variation 7: /note="A in position 7 is a 2'-O-Methyladenosine (mA)"
  variation 8: /note="G in position 8 is a 2'-fluoro-guanosine (fG)"
  variation 9: /note="U in position 9 is a 2'-O-Methyluridine (mU)"
  variation 10: /note="G in position 10 is a 2'-fluoro-guanosine (fG)"
  variation 11: /note="U in position 11 is a 2'-O-Methyluridine (mU)"
  variation 12: /note="U in position 12 is a 2'- fluoro-uridine (fU)"
  variation 13: /note="C in position 13 is a 2'-fluoro-cytidine (fC)"
  variation 14: /note="U in position 14 is a 2'- fluoro-uridine (fU)"
  variation 15: /note="U in position 15 is a 2'-O-Methyluridine (mU)"
  variation 16: /note="G in position 16 is a 2'-fluoro-guanosine (fG)"
  variation 17: /note="C in position 17 is a 2'-O-Methylcytidine (mC)"
  variation 18: /note="U in position 18 is a 2'- fluoro-uridine (fU)"
  variation 19: /note="C in position 19 is a 2'-O-Methylcytidine (mC)"
  variation 20: /note="U in position 20 is a 2'- fluoro-uridine (fU)"
  variation 21: /note="A in position 21 is a 2'-O-Methyladenosine (mA)"
  variation 22: /note="U in position 22 is a 2'- fluoro-uridine (fU)"
  variation 22: /note="the nucleotide in position 22 and the nucleotide in position 23 are linked through a phosphorothiate linkage "
  variation 23: /note="A in position 23 is a lA1b analog"
  variation 23: /note="the nucleotide in position 23 and the nucleotide in position 22 are linked through a phosphorothiate linkage "
  variation 23: /note="the nucleotide in position 23 and the nucleotide in position 24 are linked through a phosphorothiate linkage "
  variation 24: /note="A in position 24 is a 2'-fluoro-adenosine (fA)"
  variation 24: /note="the nucleotide in position 24 and the nucleotide in position 23 are linked through a phosphorothiate linkage "
tttaacaguguucuugcucuauaa

SEQ ID NO: 68 - RNA, 24 nt, Artificial Sequence
  ss3-39
  variation 1: /note="T in position 1 is a lgT7 analog"
  variation 2: /note="T in position 2 is a lgT7 analog"
  variation 3: /note="T in position 3 is a lgT7 analog"
  variation 4: /note="A in position 4 is a 2'-fluoro-adenosine (fA)"
  variation 5: /note="A in position 5 is a 2'-O-Methyladenosine (mA)"
  variation 6: /note="C in position 6 is a 2'-fluoro-cytidine (fC)"
  variation 7: /note="A in position 7 is a 2'-O-Methyladenosine (mA)"
  variation 8: /note="G in position 8 is a 2'-fluoro-guanosine (fG)"
  variation 9: /note="U in position 9 is a 2'-O-Methyluridine (mU)"
  variation 10: /note="G in position 10 is a 2'-fluoro-guanosine (fG)"
  variation 11: /note="U in position 11 is a 2'-O-Methyluridine (mU)"
  variation 12: /note="U in position 12 is a 2'- fluoro-uridine (fU)"
  variation 13: /note="C in position 13 is a 2'-fluoro-cytidine (fC)"
  variation 14: /note="U in position 14 is a 2'- fluoro-uridine (fU)"
  variation 15: /note="U in position 15 is a 2'-O-Methyluridine (mU)"
  variation 16: /note="G in position 16 is a 2'-fluoro-guanosine (fG)"
  variation 17: /note="C in position 17 is a 2'-O-Methylcytidine (mC)"
  variation 18: /note="U in position 18 is a 2'- fluoro-uridine (fU)"
  variation 19: /note="C in position 19 is a 2'-O-Methylcytidine (mC)"
  variation 20: /note="U in position 20 is a 2'- fluoro-uridine (fU)"
  variation 21: /note="A in position 21 is a 2'-O-Methyladenosine (mA)"
  variation 22: /note="U in position 22 is a 2'- fluoro-uridine (fU)"
  variation 22: /note="the nucleotide in position 22 and the nucleotide in position 23 are linked through a phosphorothiate linkage "
  variation 23: /note="A in position 23 is a 2'-O-Methyladenosine (mA)"
  variation 23: /note="the nucleotide in position 23 and the nucleotide in position 22 are linked through a phosphorothiate linkage "
  variation 23: /note="the nucleotide in position 23 and the nucleotide in position 24 are linked through a phosphorothiate linkage "
  variation 24: /note="A in position 24 is a lA1b analog"
  variation 24: /note="the nucleotide in position 24 and the nucleotide in position 23 are linked through a phosphorothiate linkage "
tttaacaguguucuugcucuauaa

SEQ ID NO: 69 - RNA, 23 nt, Artificial Sequence
  as3-1
  variation 1: /note="U in position 1 is a 2'-O-Methyluridine (mU)"
  variation 1: /note="the nucleotide in position 1 and the nucleotide in position 2 are linked through a phosphorothiate linkage "
  variation 2: /note="U in position 2 is a 2'- fluoro-uridine (fU)"
  variation 2: /note="the nucleotide in position 2 and the nucleotide in position 1 are linked through a phosphorothiate "
  variation 2: /note="the nucleotide in position 2 and the nucleotide in position 3 are linked through a phosphorothiate "
  variation 3: /note="A in position 3 is a 2'-O-Methyladenosine (mA)"
  variation 3: /note="the nucleotide in position 3 and the nucleotide in position 2 are linked through a phosphorothiate linkage "
  variation 4: /note="U in position 4 is a 2'- fluoro-uridine (fU)"
  variation 5: /note="A in position 5 is a 2'-O-Methyladenosine (mA)"
  variation 6: /note="G in position 6 is a 2'-fluoro-guanosine (fG)"
  variation 7: /note="A in position 7 is a 2'-O-Methyladenosine (mA)"
  variation 8: /note="G in position 8 is a 2'-fluoro-guanosine (fG)"
  variation 9: /note="C in position 9 is a 2'-O-Methylcytidine (mC)"
  variation 10: /note="A in position 10 is a 2'-fluoro-adenosine (fA)"
  variation 11: /note="A in position 11 is a 2'-O-Methyladenosine (mA)"
  variation 12: /note="G in position 12 is a 2'-O-Methylguanosine (mG)"
  variation 13: /note="A in position 13 is a 2'-O-Methyladenosine (mA)"
  variation 14: /note="A in position 14 is a 2'-fluoro-adenosine (fA)"
  variation 15: /note="C in position 15 is a 2'-O-Methylcytidine (mC)"
  variation 16: /note="A in position 16 is a 2'-fluoro-adenosine (fA)"
  variation 17: /note="C in position 17 is a 2'-O-Methylcytidine (mC)"
  variation 18: /note="U in position 18 is a 2'- fluoro-uridine (fU)"
  variation 19: /note="G in position 19 is a 2'-O-Methylguanosine (mG)"
  variation 20: /note="U in position 20 is a 2'- fluoro-uridine (fU)"
  variation 21: /note="U in position 21 is a 2'-O-Methyluridine (mU)"
  variation 21: /note="the nucleotide in position 21 and the nucleotide in position 22 are linked through a phosphorothiate linkage "
  variation 22: /note="U in position 22 is a 2'-O-Methyluridine (mU)"
  variation 22: /note="the nucleotide in position 22 and the nucleotide in position 21 are linked through a phosphorothiate linkage "
  variation 22: /note="the nucleotide in position 22 and the nucleotide in position 23 are linked through a phosphorothiate linkage "
  variation 23: /note="U in position 23 is a 2'-O-Methyluridine (mU)"
  variation 23: /note="the nucleotide in position 23 and the nucleotide in position 22 are linked through a phosphorothiate linkage "
uuauagagcaagaacacuguuuu

SEQ ID NO: 70 - RNA, 23 nt, Artificial Sequence
  as3-2
  variation 1: /note="U in position 1 is a lU4b analog"
  variation 1: /note="the nucleotide in position 1 and the nucleotide in position 2 are linked through a phosphorothiate linkage "
  variation 2: /note="U in position 2 is a 2'- fluoro-uridine (fU)"
  variation 2: /note="the nucleotide in position 2 and the nucleotide in position 1 are linked through a phosphorothiate "
  variation 2: /note="the nucleotide in position 2 and the nucleotide in position 3 are linked through a phosphorothiate "
  variation 3: /note="A in position 3 is a 2'-O-Methyladenosine (mA)"
  variation 3: /note="the nucleotide in position 3 and the nucleotide in position 2 are linked through a phosphorothiate linkage "
  variation 4: /note="U in position 4 is a 2'- fluoro-uridine (fU)"
  variation 5: /note="A in position 5 is a 2'-O-Methyladenosine (mA)"
  variation 6: /note="G in position 6 is a 2'-fluoro-guanosine (fG)"
  variation 7: /note="A in position 7 is a 2'-O-Methyladenosine (mA)"
  variation 8: /note="G in position 8 is a 2'-fluoro-guanosine (fG)"
  variation 9: /note="C in position 9 is a 2'-O-Methylcytidine (mC)"
  variation 10: /note="A in position 10 is a 2'-fluoro-adenosine (fA)"
  variation 11: /note="A in position 11 is a 2'-O-Methyladenosine (mA)"
  variation 12: /note="G in position 12 is a 2'-O-Methylguanosine (mG)"
  variation 13: /note="A in position 13 is a 2'-O-Methyladenosine (mA)"
  variation 14: /note="A in position 14 is a 2'-fluoro-adenosine (fA)"
  variation 15: /note="C in position 15 is a 2'-O-Methylcytidine (mC)"
  variation 16: /note="A in position 16 is a 2'-fluoro-adenosine (fA)"
  variation 17: /note="C in position 17 is a 2'-O-Methylcytidine (mC)"
  variation 18: /note="U in position 18 is a 2'- fluoro-uridine (fU)"
  variation 19: /note="G in position 19 is a 2'-O-Methylguanosine (mG)"
  variation 20: /note="U in position 20 is a 2'- fluoro-uridine (fU)"
  variation 21: /note="U in position 21 is a 2'-O-Methyluridine (mU)"
  variation 21: /note="the nucleotide in position 21 and the nucleotide in position 22 are linked through a phosphorothiate linkage "
  variation 22: /note="U in position 22 is a 2'-O-Methyluridine (mU)"
  variation 22: /note="the nucleotide in position 22 and the nucleotide in position 21 are linked through a phosphorothiate linkage "
  variation 22: /note="the nucleotide in position 22 and the nucleotide in position 23 are linked through a phosphorothiate linkage "
  variation 23: /note="U in position 23 is a 2'-O-Methyluridine (mU)"
  variation 23: /note="the nucleotide in position 23 and the nucleotide in position 22 are linked through a phosphorothiate linkage "
uuauagagcaagaacacuguuuu

SEQ ID NO: 71 - RNA, 23 nt, Artificial Sequence
  as3-3
  variation 1: /note="U in position 1 is a 2'-O-Methyluridine (mU)"
  variation 1: /note="the nucleotide in position 1 and the nucleotide in position 2 are linked through a phosphorothiate linkage "
  variation 2: /note="U in position 2 is a lU4b analog"
  variation 2: /note="the nucleotide in position 2 and the nucleotide in position 1 are linked through a phosphorothiate "
  variation 2: /note="the nucleotide in position 2 and the nucleotide in position 3 are linked through a phosphorothiate "
  variation 3: /note="A in position 3 is a 2'-O-Methyladenosine (mA)"
  variation 3: /note="the nucleotide in position 3 and the nucleotide in position 2 are linked through a phosphorothiate linkage "
  variation 4: /note="U in position 4 is a 2'- fluoro-uridine (fU)"
  variation 5: /note="A in position 5 is a 2'-O-Methyladenosine (mA)"
  variation 6: /note="G in position 6 is a 2'-fluoro-guanosine (fG)"
  variation 7: /note="A in position 7 is a 2'-O-Methyladenosine (mA)"
  variation 8: /note="G in position 8 is a 2'-fluoro-guanosine (fG)"
  variation 9: /note="C in position 9 is a 2'-O-Methylcytidine (mC)"
  variation 10: /note="A in position 10 is a 2'-fluoro-adenosine (fA)"
  variation 11: /note="A in position 11 is a 2'-O-Methyladenosine (mA)"
  variation 12: /note="G in position 12 is a 2'-O-Methylguanosine (mG)"
  variation 13: /note="A in position 13 is a 2'-O-Methyladenosine (mA)"
  variation 14: /note="A in position 14 is a 2'-fluoro-adenosine (fA)"
  variation 15: /note="C in position 15 is a 2'-O-Methylcytidine (mC)"
  variation 16: /note="A in position 16 is a 2'-fluoro-adenosine (fA)"
  variation 17: /note="C in position 17 is a 2'-O-Methylcytidine (mC)"
  variation 18: /note="U in position 18 is a 2'- fluoro-uridine (fU)"
  variation 19: /note="G in position 19 is a 2'-O-Methylguanosine (mG)"
  variation 20: /note="U in position 20 is a 2'- fluoro-uridine (fU)"
  variation 21: /note="U in position 21 is a 2'-O-Methyluridine (mU)"
  variation 21: /note="the nucleotide in position 21 and the nucleotide in position 22 are linked through a phosphorothiate linkage "
  variation 22: /note="U in position 22 is a 2'-O-Methyluridine (mU)"
  variation 22: /note="the nucleotide in position 22 and the nucleotide in position 21 are linked through a phosphorothiate linkage "
  variation 22: /note="the nucleotide in position 22 and the nucleotide in position 23 are linked through a phosphorothiate linkage "
  variation 23: /note="U in position 23 is a 2'-O-Methyluridine (mU)"
  variation 23: /note="the nucleotide in position 23 and the nucleotide in position 22 are linked through a phosphorothiate linkage "
uuauagagcaagaacacuguuuu

SEQ ID NO: 72 - RNA, 23 nt, Artificial Sequence
  as3-4
  variation 1: /note="U in position 1 is a 2'-O-Methyluridine (mU)"
  variation 1: /note="the nucleotide in position 1 and the nucleotide in position 2 are linked through a phosphorothiate linkage "
  variation 2: /note="U in position 2 is a 2'- fluoro-uridine (fU)"
  variation 2: /note="the nucleotide in position 2 and the nucleotide in position 1 are linked through a phosphorothiate "
  variation 2: /note="the nucleotide in position 2 and the nucleotide in position 3 are linked through a phosphorothiate "
  variation 3: /note="A in position 3 is a lA4b analog"
  variation 3: /note="the nucleotide in position 3 and the nucleotide in position 2 are linked through a phosphorothiate linkage "
  variation 4: /note="U in position 4 is a 2'- fluoro-uridine (fU)"
  variation 5: /note="A in position 5 is a 2'-O-Methyladenosine (mA)"
  variation 6: /note="G in position 6 is a 2'-fluoro-guanosine (fG)"
  variation 7: /note="A in position 7 is a 2'-O-Methyladenosine (mA)"
  variation 8: /note="G in position 8 is a 2'-fluoro-guanosine (fG)"
  variation 9: /note="C in position 9 is a 2'-O-Methylcytidine (mC)"
  variation 10: /note="A in position 10 is a 2'-fluoro-adenosine (fA)"
  variation 11: /note="A in position 11 is a 2'-O-Methyladenosine (mA)"
  variation 12: /note="G in position 12 is a 2'-O-Methylguanosine (mG)"
  variation 13: /note="A in position 13 is a 2'-O-Methyladenosine (mA)"
  variation 14: /note="A in position 14 is a 2'-fluoro-adenosine (fA)"
  variation 15: /note="C in position 15 is a 2'-O-Methylcytidine (mC)"
  variation 16: /note="A in position 16 is a 2'-fluoro-adenosine (fA)"
  variation 17: /note="C in position 17 is a 2'-O-Methylcytidine (mC)"
  variation 18: /note="U in position 18 is a 2'- fluoro-uridine (fU)"
  variation 19: /note="G in position 19 is a 2'-O-Methylguanosine (mG)"
  variation 20: /note="U in position 20 is a 2'- fluoro-uridine (fU)"
  variation 21: /note="U in position 21 is a 2'-O-Methyluridine (mU)"
  variation 21: /note="the nucleotide in position 21 and the nucleotide in position 22 are linked through a phosphorothiate linkage "
  variation 22: /note="U in position 22 is a 2'-O-Methyluridine (mU)"
  variation 22: /note="the nucleotide in position 22 and the nucleotide in position 21 are linked through a phosphorothiate linkage "
  variation 22: /note="the nucleotide in position 22 and the nucleotide in position 23 are linked through a phosphorothiate linkage "
  variation 23: /note="U in position 23 is a 2'-O-Methyluridine (mU)"
  variation 23: /note="the nucleotide in position 23 and the nucleotide in position 22 are linked through a phosphorothiate linkage "
uuauagagcaagaacacuguuuu

SEQ ID NO: 73 - RNA, 23 nt, Artificial Sequence
  as3-5
  variation 1: /note="U in position 1 is a 2'-O-Methyluridine (mU)"
  variation 1: /note="the nucleotide in position 1 and the nucleotide in position 2 are linked through a phosphorothiate linkage "
  variation 2: /note="U in position 2 is a 2'- fluoro-uridine (fU)"
  variation 2: /note="the nucleotide in position 2 and the nucleotide in position 1 are linked through a phosphorothiate "
  variation 2: /note="the nucleotide in position 2 and the nucleotide in position 3 are linked through a phosphorothiate "
  variation 3: /note="A in position 3 is a 2'-O-Methyladenosine (mA)"
  variation 3: /note="the nucleotide in position 3 and the nucleotide in position 2 are linked through a phosphorothiate linkage "
  variation 4: /note="U in position 4 is a lU4b analog"
  variation 5: /note="A in position 5 is a 2'-O-Methyladenosine (mA)"
  variation 6: /note="G in position 6 is a 2'-fluoro-guanosine (fG)"
  variation 7: /note="A in position 7 is a 2'-O-Methyladenosine (mA)"
  variation 8: /note="G in position 8 is a 2'-fluoro-guanosine (fG)"
  variation 9: /note="C in position 9 is a 2'-O-Methylcytidine (mC)"
  variation 10: /note="A in position 10 is a 2'-fluoro-adenosine (fA)"
  variation 11: /note="A in position 11 is a 2'-O-Methyladenosine (mA)"
  variation 12: /note="G in position 12 is a 2'-O-Methylguanosine (mG)"
  variation 13: /note="A in position 13 is a 2'-O-Methyladenosine (mA)"
  variation 14: /note="A in position 14 is a 2'-fluoro-adenosine (fA)"
  variation 15: /note="C in position 15 is a 2'-O-Methylcytidine (mC)"
  variation 16: /note="A in position 16 is a 2'-fluoro-adenosine (fA)"
  variation 17: /note="C in position 17 is a 2'-O-Methylcytidine (mC)"
  variation 18: /note="U in position 18 is a 2'- fluoro-uridine (fU)"
  variation 19: /note="G in position 19 is a 2'-O-Methylguanosine (mG)"
  variation 20: /note="U in position 20 is a 2'- fluoro-uridine (fU)"
  variation 21: /note="U in position 21 is a 2'-O-Methyluridine (mU)"
  variation 21: /note="the nucleotide in position 21 and the nucleotide in position 22 are linked through a phosphorothiate linkage "
  variation 22: /note="U in position 22 is a 2'-O-Methyluridine (mU)"
  variation 22: /note="the nucleotide in position 22 and the nucleotide in position 21 are linked through a phosphorothiate linkage "
  variation 22: /note="the nucleotide in position 22 and the nucleotide in position 23 are linked through a phosphorothiate linkage "
  variation 23: /note="U in position 23 is a 2'-O-Methyluridine (mU)"
  variation 23: /note="the nucleotide in position 23 and the nucleotide in position 22 are linked through a phosphorothiate linkage "
uuauagagcaagaacacuguuuu

SEQ ID NO: 74 - RNA, 23 nt, Artificial Sequence
  as3-6
  variation 1: /note="U in position 1 is a 2'-O-Methyluridine (mU)"
  variation 1: /note="the nucleotide in position 1 and the nucleotide in position 2 are linked through a phosphorothiate linkage "
  variation 2: /note="U in position 2 is a 2'- fluoro-uridine (fU)"
  variation 2: /note="the nucleotide in position 2 and the nucleotide in position 1 are linked through a phosphorothiate "
  variation 2: /note="the nucleotide in position 2 and the nucleotide in position 3 are linked through a phosphorothiate "
  variation 3: /note="A in position 3 is a 2'-O-Methyladenosine (mA)"
  variation 3: /note="the nucleotide in position 3 and the nucleotide in position 2 are linked through a phosphorothiate linkage "
  variation 4: /note="U in position 4 is a 2'- fluoro-uridine (fU)"
  variation 5: /note="A in position 5 is a lA4b analog"
  variation 6: /note="G in position 6 is a 2'-fluoro-guanosine (fG)"
  variation 7: /note="A in position 7 is a 2'-O-Methyladenosine (mA)"
  variation 8: /note="G in position 8 is a 2'-fluoro-guanosine (fG)"
  variation 9: /note="C in position 9 is a 2'-O-Methylcytidine (mC)"
  variation 10: /note="A in position 10 is a 2'-fluoro-adenosine (fA)"
  variation 11: /note="A in position 11 is a 2'-O-Methyladenosine (mA)"
  variation 12: /note="G in position 12 is a 2'-O-Methylguanosine (mG)"
  variation 13: /note="A in position 13 is a 2'-O-Methyladenosine (mA)"
  variation 14: /note="A in position 14 is a 2'-fluoro-adenosine (fA)"
  variation 15: /note="C in position 15 is a 2'-O-Methylcytidine (mC)"
  variation 16: /note="A in position 16 is a 2'-fluoro-adenosine (fA)"
  variation 17: /note="C in position 17 is a 2'-O-Methylcytidine (mC)"
  variation 18: /note="U in position 18 is a 2'- fluoro-uridine (fU)"
  variation 19: /note="G in position 19 is a 2'-O-Methylguanosine (mG)"
  variation 20: /note="U in position 20 is a 2'- fluoro-uridine (fU)"
  variation 21: /note="U in position 21 is a 2'-O-Methyluridine (mU)"
  variation 21: /note="the nucleotide in position 21 and the nucleotide in position 22 are linked through a phosphorothiate linkage "
  variation 22: /note="U in position 22 is a 2'-O-Methyluridine (mU)"
  variation 22: /note="the nucleotide in position 22 and the nucleotide in position 21 are linked through a phosphorothiate linkage "
  variation 22: /note="the nucleotide in position 22 and the nucleotide in position 23 are linked through a phosphorothiate linkage "
  variation 23: /note="U in position 23 is a 2'-O-Methyluridine (mU)"
  variation 23: /note="the nucleotide in position 23 and the nucleotide in position 22 are linked through a phosphorothiate linkage "
uuauagagcaagaacacuguuuu

SEQ ID NO: 75 - RNA, 23 nt, Artificial Sequence
  as3-7
  variation 1: /note="U in position 1 is a 2'-O-Methyluridine (mU)"
  variation 1: /note="the nucleotide in position 1 and the nucleotide in position 2 are linked through a phosphorothiate linkage "
  variation 2: /note="U in position 2 is a 2'- fluoro-uridine (fU)"
  variation 2: /note="the nucleotide in position 2 and the nucleotide in position 1 are linked through a phosphorothiate "
  variation 2: /note="the nucleotide in position 2 and the nucleotide in position 3 are linked through a phosphorothiate "
  variation 3: /note="A in position 3 is a 2'-O-Methyladenosine (mA)"
  variation 3: /note="the nucleotide in position 3 and the nucleotide in position 2 are linked through a phosphorothiate linkage "
  variation 4: /note="U in position 4 is a 2'- fluoro-uridine (fU)"
  variation 5: /note="A in position 5 is a 2'-O-Methyladenosine (mA)"
  variation 6: /note="G in position 6 is a lG4b analog"
  variation 7: /note="A in position 7 is a 2'-O-Methyladenosine (mA)"
  variation 8: /note="G in position 8 is a 2'-fluoro-guanosine (fG)"
  variation 9: /note="C in position 9 is a 2'-O-Methylcytidine (mC)"
  variation 10: /note="A in position 10 is a 2'-fluoro-adenosine (fA)"
  variation 11: /note="A in position 11 is a 2'-O-Methyladenosine (mA)"
  variation 12: /note="G in position 12 is a 2'-O-Methylguanosine (mG)"
  variation 13: /note="A in position 13 is a 2'-O-Methyladenosine (mA)"
  variation 14: /note="A in position 14 is a 2'-fluoro-adenosine (fA)"
  variation 15: /note="C in position 15 is a 2'-O-Methylcytidine (mC)"
  variation 16: /note="A in position 16 is a 2'-fluoro-adenosine (fA)"
  variation 17: /note="C in position 17 is a 2'-O-Methylcytidine (mC)"
  variation 18: /note="U in position 18 is a 2'- fluoro-uridine (fU)"
  variation 19: /note="G in position 19 is a 2'-O-Methylguanosine (mG)"
  variation 20: /note="U in position 20 is a 2'- fluoro-uridine (fU)"
  variation 21: /note="U in position 21 is a 2'-O-Methyluridine (mU)"
  variation 21: /note="the nucleotide in position 21 and the nucleotide in position 22 are linked through a phosphorothiate linkage "
  variation 22: /note="U in position 22 is a 2'-O-Methyluridine (mU)"
  variation 22: /note="the nucleotide in position 22 and the nucleotide in position 21 are linked through a phosphorothiate linkage "
  variation 22: /note="the nucleotide in position 22 and the nucleotide in position 23 are linked through a phosphorothiate linkage "
  variation 23: /note="U in position 23 is a 2'-O-Methyluridine (mU)"
  variation 23: /note="the nucleotide in position 23 and the nucleotide in position 22 are linked through a phosphorothiate linkage "
uuauagagcaagaacacuguuuu

SEQ ID NO: 76 - RNA, 23 nt, Artificial Sequence
  as3-8
  variation 1: /note="U in position 1 is a 2'-O-Methyluridine (mU)"
  variation 1: /note="the nucleotide in position 1 and the nucleotide in position 2 are linked through a phosphorothiate linkage "
  variation 2: /note="U in position 2 is a 2'- fluoro-uridine (fU)"
  variation 2: /note="the nucleotide in position 2 and the nucleotide in position 1 are linked through a phosphorothiate "
  variation 2: /note="the nucleotide in position 2 and the nucleotide in position 3 are linked through a phosphorothiate "
  variation 3: /note="A in position 3 is a 2'-O-Methyladenosine (mA)"
  variation 3: /note="the nucleotide in position 3 and the nucleotide in position 2 are linked through a phosphorothiate linkage "
  variation 4: /note="U in position 4 is a 2'- fluoro-uridine (fU)"
  variation 5: /note="A in position 5 is a 2'-O-Methyladenosine (mA)"
  variation 6: /note="G in position 6 is a 2'-fluoro-guanosine (fG)"
  variation 7: /note="A in position 7 is a lA4b analog"
  variation 8: /note="G in position 8 is a 2'-fluoro-guanosine (fG)"
  variation 9: /note="C in position 9 is a 2'-O-Methylcytidine (mC)"
  variation 10: /note="A in position 10 is a 2'-fluoro-adenosine (fA)"
  variation 11: /note="A in position 11 is a 2'-O-Methyladenosine (mA)"
  variation 12: /note="G in position 12 is a 2'-O-Methylguanosine (mG)"
  variation 13: /note="A in position 13 is a 2'-O-Methyladenosine (mA)"
  variation 14: /note="A in position 14 is a 2'-fluoro-adenosine (fA)"
  variation 15: /note="C in position 15 is a 2'-O-Methylcytidine (mC)"
  variation 16: /note="A in position 16 is a 2'-fluoro-adenosine (fA)"
  variation 17: /note="C in position 17 is a 2'-O-Methylcytidine (mC)"
  variation 18: /note="U in position 18 is a 2'- fluoro-uridine (fU)"
  variation 19: /note="G in position 19 is a 2'-O-Methylguanosine (mG)"
  variation 20: /note="U in position 20 is a 2'- fluoro-uridine (fU)"
  variation 21: /note="U in position 21 is a 2'-O-Methyluridine (mU)"
  variation 21: /note="the nucleotide in position 21 and the nucleotide in position 22 are linked through a phosphorothiate linkage "
  variation 22: /note="U in position 22 is a 2'-O-Methyluridine (mU)"
  variation 22: /note="the nucleotide in position 22 and the nucleotide in position 21 are linked through a phosphorothiate linkage "
  variation 22: /note="the nucleotide in position 22 and the nucleotide in position 23 are linked through a phosphorothiate linkage "
  variation 23: /note="U in position 23 is a 2'-O-Methyluridine (mU)"
  variation 23: /note="the nucleotide in position 23 and the nucleotide in position 22 are linked through a phosphorothiate linkage "
uuauagagcaagaacacuguuuu

SEQ ID NO: 77 - RNA, 23 nt, Artificial Sequence
  as3-9
  variation 1: /note="U in position 1 is a 2'-O-Methyluridine (mU)"
  variation 1: /note="the nucleotide in position 1 and the nucleotide in position 2 are linked through a phosphorothiate linkage "
  variation 2: /note="U in position 2 is a 2'- fluoro-uridine (fU)"
  variation 2: /note="the nucleotide in position 2 and the nucleotide in position 1 are linked through a phosphorothiate "
  variation 2: /note="the nucleotide in position 2 and the nucleotide in position 3 are linked through a phosphorothiate "
  variation 3: /note="A in position 3 is a 2'-O-Methyladenosine (mA)"
  variation 3: /note="the nucleotide in position 3 and the nucleotide in position 2 are linked through a phosphorothiate linkage "
  variation 4: /note="U in position 4 is a 2'- fluoro-uridine (fU)"
  variation 5: /note="A in position 5 is a 2'-O-Methyladenosine (mA)"
  variation 6: /note="G in position 6 is a 2'-fluoro-guanosine (fG)"
  variation 7: /note="A in position 7 is a 2'-O-Methyladenosine (mA)"
  variation 8: /note="G in position 8 is a lG4b analog"
  variation 9: /note="C in position 9 is a 2'-O-Methylcytidine (mC)"
  variation 10: /note="A in position 10 is a 2'-fluoro-adenosine (fA)"
  variation 11: /note="A in position 11 is a 2'-O-Methyladenosine (mA)"
  variation 12: /note="G in position 12 is a 2'-O-Methylguanosine (mG)"
  variation 13: /note="A in position 13 is a 2'-O-Methyladenosine (mA)"
  variation 14: /note="A in position 14 is a 2'-fluoro-adenosine (fA)"
  variation 15: /note="C in position 15 is a 2'-O-Methylcytidine (mC)"
  variation 16: /note="A in position 16 is a 2'-fluoro-adenosine (fA)"
  variation 17: /note="C in position 17 is a 2'-O-Methylcytidine (mC)"
  variation 18: /note="U in position 18 is a 2'- fluoro-uridine (fU)"
  variation 19: /note="G in position 19 is a 2'-O-Methylguanosine (mG)"
  variation 20: /note="U in position 20 is a 2'- fluoro-uridine (fU)"
  variation 21: /note="U in position 21 is a 2'-O-Methyluridine (mU)"
  variation 21: /note="the nucleotide in position 21 and the nucleotide in position 22 are linked through a phosphorothiate linkage "
  variation 22: /note="U in position 22 is a 2'-O-Methyluridine (mU)"
  variation 22: /note="the nucleotide in position 22 and the nucleotide in position 21 are linked through a phosphorothiate linkage "
  variation 22: /note="the nucleotide in position 22 and the nucleotide in position 23 are linked through a phosphorothiate linkage "
  variation 23: /note="U in position 23 is a 2'-O-Methyluridine (mU)"
  variation 23: /note="the nucleotide in position 23 and the nucleotide in position 22 are linked through a phosphorothiate linkage "
uuauagagcaagaacacuguuuu

SEQ ID NO: 78 - RNA, 23 nt, Artificial Sequence
  as3-10
  variation 1: /note="U in position 1 is a 2'-O-Methyluridine (mU)"
  variation 1: /note="the nucleotide in position 1 and the nucleotide in position 2 are linked through a phosphorothiate linkage "
  variation 2: /note="U in position 2 is a 2'- fluoro-uridine (fU)"
  variation 2: /note="the nucleotide in position 2 and the nucleotide in position 1 are linked through a phosphorothiate "
  variation 2: /note="the nucleotide in position 2 and the nucleotide in position 3 are linked through a phosphorothiate "
  variation 3: /note="A in position 3 is a 2'-O-Methyladenosine (mA)"
  variation 3: /note="the nucleotide in position 3 and the nucleotide in position 2 are linked through a phosphorothiate linkage "
  variation 4: /note="U in position 4 is a 2'- fluoro-uridine (fU)"
  variation 5: /note="A in position 5 is a 2'-O-Methyladenosine (mA)"
  variation 6: /note="G in position 6 is a 2'-fluoro-guanosine (fG)"
  variation 7: /note="A in position 7 is a 2'-O-Methyladenosine (mA)"
  variation 8: /note="G in position 8 is a 2'-fluoro-guanosine (fG)"
  variation 9: /note="C in position 9 is a lC4b analog"
  variation 10: /note="A in position 10 is a 2'-fluoro-adenosine (fA)"
  variation 11: /note="A in position 11 is a 2'-O-Methyladenosine (mA)"
  variation 12: /note="G in position 12 is a 2'-O-Methylguanosine (mG)"
  variation 13: /note="A in position 13 is a 2'-O-Methyladenosine (mA)"
  variation 14: /note="A in position 14 is a 2'-fluoro-adenosine (fA)"
  variation 15: /note="C in position 15 is a 2'-O-Methylcytidine (mC)"
  variation 16: /note="A in position 16 is a 2'-fluoro-adenosine (fA)"
  variation 17: /note="C in position 17 is a 2'-O-Methylcytidine (mC)"
  variation 18: /note="U in position 18 is a 2'- fluoro-uridine (fU)"
  variation 19: /note="G in position 19 is a 2'-O-Methylguanosine (mG)"
  variation 20: /note="U in position 20 is a 2'- fluoro-uridine (fU)"
  variation 21: /note="U in position 21 is a 2'-O-Methyluridine (mU)"
  variation 21: /note="the nucleotide in position 21 and the nucleotide in position 22 are linked through a phosphorothiate linkage "
  variation 22: /note="U in position 22 is a 2'-O-Methyluridine (mU)"
  variation 22: /note="the nucleotide in position 22 and the nucleotide in position 21 are linked through a phosphorothiate linkage "
  variation 22: /note="the nucleotide in position 22 and the nucleotide in position 23 are linked through a phosphorothiate linkage "
  variation 23: /note="U in position 23 is a 2'-O-Methyluridine (mU)"
  variation 23: /note="the nucleotide in position 23 and the nucleotide in position 22 are linked through a phosphorothiate linkage "
uuauagagcaagaacacuguuuu

SEQ ID NO: 79 - RNA, 23 nt, Artificial Sequence
  as3-11
  variation 1: /note="U in position 1 is a 2'-O-Methyluridine (mU)"
  variation 1: /note="the nucleotide in position 1 and the nucleotide in position 2 are linked through a phosphorothiate linkage "
  variation 2: /note="U in position 2 is a 2'- fluoro-uridine (fU)"
  variation 2: /note="the nucleotide in position 2 and the nucleotide in position 1 are linked through a phosphorothiate "
  variation 2: /note="the nucleotide in position 2 and the nucleotide in position 3 are linked through a phosphorothiate "
  variation 3: /note="A in position 3 is a 2'-O-Methyladenosine (mA)"
  variation 3: /note="the nucleotide in position 3 and the nucleotide in position 2 are linked through a phosphorothiate linkage "
  variation 4: /note="U in position 4 is a 2'- fluoro-uridine (fU)"
  variation 5: /note="A in position 5 is a 2'-O-Methyladenosine (mA)"
  variation 6: /note="G in position 6 is a 2'-fluoro-guanosine (fG)"
  variation 7: /note="A in position 7 is a 2'-O-Methyladenosine (mA)"
  variation 8: /note="G in position 8 is a 2'-fluoro-guanosine (fG)"
  variation 9: /note="C in position 9 is a 2'-O-Methylcytidine (mC)"
  variation 10: /note="A in position 10 is a lA4b analog"
  variation 11: /note="A in position 11 is a 2'-O-Methyladenosine (mA)"
  variation 12: /note="G in position 12 is a 2'-O-Methylguanosine (mG)"
  variation 13: /note="A in position 13 is a 2'-O-Methyladenosine (mA)"
  variation 14: /note="A in position 14 is a 2'-fluoro-adenosine (fA)"
  variation 15: /note="C in position 15 is a 2'-O-Methylcytidine (mC)"
  variation 16: /note="A in position 16 is a 2'-fluoro-adenosine (fA)"
  variation 17: /note="C in position 17 is a 2'-O-Methylcytidine (mC)"
  variation 18: /note="U in position 18 is a 2'- fluoro-uridine (fU)"
  variation 19: /note="G in position 19 is a 2'-O-Methylguanosine (mG)"
  variation 20: /note="U in position 20 is a 2'- fluoro-uridine (fU)"
  variation 21: /note="U in position 21 is a 2'-O-Methyluridine (mU)"
  variation 21: /note="the nucleotide in position 21 and the nucleotide in position 22 are linked through a phosphorothiate linkage "
  variation 22: /note="U in position 22 is a 2'-O-Methyluridine (mU)"
  variation 22: /note="the nucleotide in position 22 and the nucleotide in position 21 are linked through a phosphorothiate linkage "
  variation 22: /note="the nucleotide in position 22 and the nucleotide in position 23 are linked through a phosphorothiate linkage "
  variation 23: /note="U in position 23 is a 2'-O-Methyluridine (mU)"
  variation 23: /note="the nucleotide in position 23 and the nucleotide in position 22 are linked through a phosphorothiate linkage "
uuauagagcaagaacacuguuuu

SEQ ID NO: 80 - RNA, 23 nt, Artificial Sequence
  as3-12
  variation 1: /note="U in position 1 is a 2'-O-Methyluridine (mU)"
  variation 1: /note="the nucleotide in position 1 and the nucleotide in position 2 are linked through a phosphorothiate linkage "
  variation 2: /note="U in position 2 is a 2'- fluoro-uridine (fU)"
  variation 2: /note="the nucleotide in position 2 and the nucleotide in position 1 are linked through a phosphorothiate "
  variation 2: /note="the nucleotide in position 2 and the nucleotide in position 3 are linked through a phosphorothiate "
  variation 3: /note="A in position 3 is a 2'-O-Methyladenosine (mA)"
  variation 3: /note="the nucleotide in position 3 and the nucleotide in position 2 are linked through a phosphorothiate linkage "
  variation 4: /note="U in position 4 is a 2'- fluoro-uridine (fU)"
  variation 5: /note="A in position 5 is a 2'-O-Methyladenosine (mA)"
  variation 6: /note="G in position 6 is a 2'-fluoro-guanosine (fG)"
  variation 7: /note="A in position 7 is a 2'-O-Methyladenosine (mA)"
  variation 8: /note="G in position 8 is a 2'-fluoro-guanosine (fG)"
  variation 9: /note="C in position 9 is a 2'-O-Methylcytidine (mC)"
  variation 10: /note="A in position 10 is a 2'-fluoro-adenosine (fA)"
  variation 11: /note="A in position 11 is a lA4b analog"
  variation 12: /note="G in position 12 is a 2'-O-Methylguanosine (mG)"
  variation 13: /note="A in position 13 is a 2'-O-Methyladenosine (mA)"
  variation 14: /note="A in position 14 is a 2'-fluoro-adenosine (fA)"
  variation 15: /note="C in position 15 is a 2'-O-Methylcytidine (mC)"
  variation 16: /note="A in position 16 is a 2'-fluoro-adenosine (fA)"
  variation 17: /note="C in position 17 is a 2'-O-Methylcytidine (mC)"
  variation 18: /note="U in position 18 is a 2'- fluoro-uridine (fU)"
  variation 19: /note="G in position 19 is a 2'-O-Methylguanosine (mG)"
  variation 20: /note="U in position 20 is a 2'- fluoro-uridine (fU)"
  variation 21: /note="U in position 21 is a 2'-O-Methyluridine (mU)"
  variation 21: /note="the nucleotide in position 21 and the nucleotide in position 22 are linked through a phosphorothiate linkage "
  variation 22: /note="U in position 22 is a 2'-O-Methyluridine (mU)"
  variation 22: /note="the nucleotide in position 22 and the nucleotide in position 21 are linked through a phosphorothiate linkage "
  variation 22: /note="the nucleotide in position 22 and the nucleotide in position 23 are linked through a phosphorothiate linkage "
  variation 23: /note="U in position 23 is a 2'-O-Methyluridine (mU)"
  variation 23: /note="the nucleotide in position 23 and the nucleotide in position 22 are linked through a phosphorothiate linkage "
uuauagagcaagaacacuguuuu

SEQ ID NO: 81 - RNA, 23 nt, Artificial Sequence
  as3-13
  variation 1: /note="U in position 1 is a 2'-O-Methyluridine (mU)"
  variation 1: /note="the nucleotide in position 1 and the nucleotide in position 2 are linked through a phosphorothiate linkage "
  variation 2: /note="U in position 2 is a 2'- fluoro-uridine (fU)"
  variation 2: /note="the nucleotide in position 2 and the nucleotide in position 1 are linked through a phosphorothiate "
  variation 2: /note="the nucleotide in position 2 and the nucleotide in position 3 are linked through a phosphorothiate "
  variation 3: /note="A in position 3 is a 2'-O-Methyladenosine (mA)"
  variation 3: /note="the nucleotide in position 3 and the nucleotide in position 2 are linked through a phosphorothiate linkage "
  variation 4: /note="U in position 4 is a 2'- fluoro-uridine (fU)"
  variation 5: /note="A in position 5 is a 2'-O-Methyladenosine (mA)"
  variation 6: /note="G in position 6 is a 2'-fluoro-guanosine (fG)"
  variation 7: /note="A in position 7 is a 2'-O-Methyladenosine (mA)"
  variation 8: /note="G in position 8 is a 2'-fluoro-guanosine (fG)"
  variation 9: /note="C in position 9 is a 2'-O-Methylcytidine (mC)"
  variation 10: /note="A in position 10 is a 2'-fluoro-adenosine (fA)"
  variation 11: /note="A in position 11 is a 2'-O-Methyladenosine (mA)"
  variation 12: /note="G in position 12 is a lG4b analog"
  variation 13: /note="A in position 13 is a 2'-O-Methyladenosine (mA)"
  variation 14: /note="A in position 14 is a 2'-fluoro-adenosine (fA)"
  variation 15: /note="C in position 15 is a 2'-O-Methylcytidine (mC)"
  variation 16: /note="A in position 16 is a 2'-fluoro-adenosine (fA)"
  variation 17: /note="C in position 17 is a 2'-O-Methylcytidine (mC)"
  variation 18: /note="U in position 18 is a 2'- fluoro-uridine (fU)"
  variation 19: /note="G in position 19 is a 2'-O-Methylguanosine (mG)"
  variation 20: /note="U in position 20 is a 2'- fluoro-uridine (fU)"
  variation 21: /note="U in position 21 is a 2'-O-Methyluridine (mU)"
  variation 21: /note="the nucleotide in position 21 and the nucleotide in position 22 are linked through a phosphorothiate linkage "
  variation 22: /note="U in position 22 is a 2'-O-Methyluridine (mU)"
  variation 22: /note="the nucleotide in position 22 and the nucleotide in position 21 are linked through a phosphorothiate linkage "
  variation 22: /note="the nucleotide in position 22 and the nucleotide in position 23 are linked through a phosphorothiate linkage "
  variation 23: /note="U in position 23 is a 2'-O-Methyluridine (mU)"
  variation 23: /note="the nucleotide in position 23 and the nucleotide in position 22 are linked through a phosphorothiate linkage "
uuauagagcaagaacacuguuuu

SEQ ID NO: 82 - RNA, 23 nt, Artificial Sequence
  as3-14
  variation 1: /note="U in position 1 is a 2'-O-Methyluridine (mU)"
  variation 1: /note="the nucleotide in position 1 and the nucleotide in position 2 are linked through a phosphorothiate linkage "
  variation 2: /note="U in position 2 is a 2'- fluoro-uridine (fU)"
  variation 2: /note="the nucleotide in position 2 and the nucleotide in position 1 are linked through a phosphorothiate "
  variation 2: /note="the nucleotide in position 2 and the nucleotide in position 3 are linked through a phosphorothiate "
  variation 3: /note="A in position 3 is a 2'-O-Methyladenosine (mA)"
  variation 3: /note="the nucleotide in position 3 and the nucleotide in position 2 are linked through a phosphorothiate linkage "
  variation 4: /note="U in position 4 is a 2'- fluoro-uridine (fU)"
  variation 5: /note="A in position 5 is a 2'-O-Methyladenosine (mA)"
  variation 6: /note="G in position 6 is a 2'-fluoro-guanosine (fG)"
  variation 7: /note="A in position 7 is a 2'-O-Methyladenosine (mA)"
  variation 8: /note="G in position 8 is a 2'-fluoro-guanosine (fG)"
  variation 9: /note="C in position 9 is a 2'-O-Methylcytidine (mC)"
  variation 10: /note="A in position 10 is a 2'-fluoro-adenosine (fA)"
  variation 11: /note="A in position 11 is a 2'-O-Methyladenosine (mA)"
  variation 12: /note="G in position 12 is a 2'-O-Methylguanosine (mG)"
  variation 13: /note="A in position 13 is a lA4b analog"
  variation 14: /note="A in position 14 is a 2'-fluoro-adenosine (fA)"
  variation 15: /note="C in position 15 is a 2'-O-Methylcytidine (mC)"
  variation 16: /note="A in position 16 is a 2'-fluoro-adenosine (fA)"
  variation 17: /note="C in position 17 is a 2'-O-Methylcytidine (mC)"
  variation 18: /note="U in position 18 is a 2'- fluoro-uridine (fU)"
  variation 19: /note="G in position 19 is a 2'-O-Methylguanosine (mG)"
  variation 20: /note="U in position 20 is a 2'- fluoro-uridine (fU)"
  variation 21: /note="U in position 21 is a 2'-O-Methyluridine (mU)"
  variation 21: /note="the nucleotide in position 21 and the nucleotide in position 22 are linked through a phosphorothiate linkage "
  variation 22: /note="U in position 22 is a 2'-O-Methyluridine (mU)"
  variation 22: /note="the nucleotide in position 22 and the nucleotide in position 21 are linked through a phosphorothiate linkage "
  variation 22: /note="the nucleotide in position 22 and the nucleotide in position 23 are linked through a phosphorothiate linkage "
  variation 23: /note="U in position 23 is a 2'-O-Methyluridine (mU)"
  variation 23: /note="the nucleotide in position 23 and the nucleotide in position 22 are linked through a phosphorothiate linkage "
uuauagagcaagaacacuguuuu

SEQ ID NO: 83 - RNA, 23 nt, Artificial Sequence
  as3-15
  variation 1: /note="U in position 1 is a 2'-O-Methyluridine (mU)"
  variation 1: /note="the nucleotide in position 1 and the nucleotide in position 2 are linked through a phosphorothiate linkage "
  variation 2: /note="U in position 2 is a 2'- fluoro-uridine (fU)"
  variation 2: /note="the nucleotide in position 2 and the nucleotide in position 1 are linked through a phosphorothiate "
  variation 2: /note="the nucleotide in position 2 and the nucleotide in position 3 are linked through a phosphorothiate "
  variation 3: /note="A in position 3 is a 2'-O-Methyladenosine (mA)"
  variation 3: /note="the nucleotide in position 3 and the nucleotide in position 2 are linked through a phosphorothiate linkage "
  variation 4: /note="U in position 4 is a 2'- fluoro-uridine (fU)"
  variation 5: /note="A in position 5 is a 2'-O-Methyladenosine (mA)"
  variation 6: /note="G in position 6 is a 2'-fluoro-guanosine (fG)"
  variation 7: /note="A in position 7 is a 2'-O-Methyladenosine (mA)"
  variation 8: /note="G in position 8 is a 2'-fluoro-guanosine (fG)"
  variation 9: /note="C in position 9 is a 2'-O-Methylcytidine (mC)"
  variation 10: /note="A in position 10 is a 2'-fluoro-adenosine (fA)"
  variation 11: /note="A in position 11 is a 2'-O-Methyladenosine (mA)"
  variation 12: /note="G in position 12 is a 2'-O-Methylguanosine (mG)"
  variation 13: /note="A in position 13 is a 2'-O-Methyladenosine (mA)"
  variation 14: /note="A in position 14 is a lA4b analog"
  variation 15: /note="C in position 15 is a 2'-O-Methylcytidine (mC)"
  variation 16: /note="A in position 16 is a 2'-fluoro-adenosine (fA)"
  variation 17: /note="C in position 17 is a 2'-O-Methylcytidine (mC)"
  variation 18: /note="U in position 18 is a 2'- fluoro-uridine (fU)"
  variation 19: /note="G in position 19 is a 2'-O-Methylguanosine (mG)"
  variation 20: /note="U in position 20 is a 2'- fluoro-uridine (fU)"
  variation 21: /note="U in position 21 is a 2'-O-Methyluridine (mU)"
  variation 21: /note="the nucleotide in position 21 and the nucleotide in position 22 are linked through a phosphorothiate linkage "
  variation 22: /note="U in position 22 is a 2'-O-Methyluridine (mU)"
  variation 22: /note="the nucleotide in position 22 and the nucleotide in position 21 are linked through a phosphorothiate linkage "
  variation 22: /note="the nucleotide in position 22 and the nucleotide in position 23 are linked through a phosphorothiate linkage "
  variation 23: /note="U in position 23 is a 2'-O-Methyluridine (mU)"
  variation 23: /note="the nucleotide in position 23 and the nucleotide in position 22 are linked through a phosphorothiate linkage "
uuauagagcaagaacacuguuuu

SEQ ID NO: 84 - RNA, 23 nt, Artificial Sequence
  as3-16
  variation 1: /note="U in position 1 is a 2'-O-Methyluridine (mU)"
  variation 1: /note="the nucleotide in position 1 and the nucleotide in position 2 are linked through a phosphorothiate linkage "
  variation 2: /note="U in position 2 is a 2'- fluoro-uridine (fU)"
  variation 2: /note="the nucleotide in position 2 and the nucleotide in position 1 are linked through a phosphorothiate "
  variation 2: /note="the nucleotide in position 2 and the nucleotide in position 3 are linked through a phosphorothiate "
  variation 3: /note="A in position 3 is a 2'-O-Methyladenosine (mA)"
  variation 3: /note="the nucleotide in position 3 and the nucleotide in position 2 are linked through a phosphorothiate linkage "
  variation 4: /note="U in position 4 is a 2'- fluoro-uridine (fU)"
  variation 5: /note="A in position 5 is a 2'-O-Methyladenosine (mA)"
  variation 6: /note="G in position 6 is a 2'-fluoro-guanosine (fG)"
  variation 7: /note="A in position 7 is a 2'-O-Methyladenosine (mA)"
  variation 8: /note="G in position 8 is a 2'-fluoro-guanosine (fG)"
  variation 9: /note="C in position 9 is a 2'-O-Methylcytidine (mC)"
  variation 10: /note="A in position 10 is a 2'-fluoro-adenosine (fA)"
  variation 11: /note="A in position 11 is a 2'-O-Methyladenosine (mA)"
  variation 12: /note="G in position 12 is a 2'-O-Methylguanosine (mG)"
  variation 13: /note="A in position 13 is a 2'-O-Methyladenosine (mA)"
  variation 14: /note="A in position 14 is a 2'-fluoro-adenosine (fA)"
  variation 15: /note="C in position 15 is a lC4b analog"
  variation 16: /note="A in position 16 is a 2'-fluoro-adenosine (fA)"
  variation 17: /note="C in position 17 is a 2'-O-Methylcytidine (mC)"
  variation 18: /note="U in position 18 is a 2'- fluoro-uridine (fU)"
  variation 19: /note="G in position 19 is a 2'-O-Methylguanosine (mG)"
  variation 20: /note="U in position 20 is a 2'- fluoro-uridine (fU)"
  variation 21: /note="U in position 21 is a 2'-O-Methyluridine (mU)"
  variation 21: /note="the nucleotide in position 21 and the nucleotide in position 22 are linked through a phosphorothiate linkage "
  variation 22: /note="U in position 22 is a 2'-O-Methyluridine (mU)"
  variation 22: /note="the nucleotide in position 22 and the nucleotide in position 21 are linked through a phosphorothiate linkage "
  variation 22: /note="the nucleotide in position 22 and the nucleotide in position 23 are linked through a phosphorothiate linkage "
  variation 23: /note="U in position 23 is a 2'-O-Methyluridine (mU)"
  variation 23: /note="the nucleotide in position 23 and the nucleotide in position 22 are linked through a phosphorothiate linkage "
uuauagagcaagaacacuguuuu

SEQ ID NO: 85 - RNA, 23 nt, Artificial Sequence
  as3-17
  variation 1: /note="U in position 1 is a 2'-O-Methyluridine (mU)"
  variation 1: /note="the nucleotide in position 1 and the nucleotide in position 2 are linked through a phosphorothiate linkage "
  variation 2: /note="U in position 2 is a 2'- fluoro-uridine (fU)"
  variation 2: /note="the nucleotide in position 2 and the nucleotide in position 1 are linked through a phosphorothiate "
  variation 2: /note="the nucleotide in position 2 and the nucleotide in position 3 are linked through a phosphorothiate "
  variation 3: /note="A in position 3 is a 2'-O-Methyladenosine (mA)"
  variation 3: /note="the nucleotide in position 3 and the nucleotide in position 2 are linked through a phosphorothiate linkage "
  variation 4: /note="U in position 4 is a 2'- fluoro-uridine (fU)"
  variation 5: /note="A in position 5 is a 2'-O-Methyladenosine (mA)"
  variation 6: /note="G in position 6 is a 2'-fluoro-guanosine (fG)"
  variation 7: /note="A in position 7 is a 2'-O-Methyladenosine (mA)"
  variation 8: /note="G in position 8 is a 2'-fluoro-guanosine (fG)"
  variation 9: /note="C in position 9 is a 2'-O-Methylcytidine (mC)"
  variation 10: /note="A in position 10 is a 2'-fluoro-adenosine (fA)"
  variation 11: /note="A in position 11 is a 2'-O-Methyladenosine (mA)"
  variation 12: /note="G in position 12 is a 2'-O-Methylguanosine (mG)"
  variation 13: /note="A in position 13 is a 2'-O-Methyladenosine (mA)"
  variation 14: /note="A in position 14 is a 2'-fluoro-adenosine (fA)"
  variation 15: /note="C in position 15 is a 2'-O-Methylcytidine (mC)"
  variation 16: /note="A in position 16 is a lA4b analog"
  variation 17: /note="C in position 17 is a 2'-O-Methylcytidine (mC)"
  variation 18: /note="U in position 18 is a 2'- fluoro-uridine (fU)"
  variation 19: /note="G in position 19 is a 2'-O-Methylguanosine (mG)"
  variation 20: /note="U in position 20 is a 2'- fluoro-uridine (fU)"
  variation 21: /note="U in position 21 is a 2'-O-Methyluridine (mU)"
  variation 21: /note="the nucleotide in position 21 and the nucleotide in position 22 are linked through a phosphorothiate linkage "
  variation 22: /note="U in position 22 is a 2'-O-Methyluridine (mU)"
  variation 22: /note="the nucleotide in position 22 and the nucleotide in position 21 are linked through a phosphorothiate linkage "
  variation 22: /note="the nucleotide in position 22 and the nucleotide in position 23 are linked through a phosphorothiate linkage "
  variation 23: /note="U in position 23 is a 2'-O-Methyluridine (mU)"
  variation 23: /note="the nucleotide in position 23 and the nucleotide in position 22 are linked through a phosphorothiate linkage "
uuauagagcaagaacacuguuuu

SEQ ID NO: 86 - RNA, 23 nt, Artificial Sequence
  as3-18
  variation 1: /note="U in position 1 is a 2'-O-Methyluridine (mU)"
  variation 1: /note="the nucleotide in position 1 and the nucleotide in position 2 are linked through a phosphorothiate linkage "
  variation 2: /note="U in position 2 is a 2'- fluoro-uridine (fU)"
  variation 2: /note="the nucleotide in position 2 and the nucleotide in position 1 are linked through a phosphorothiate "
  variation 2: /note="the nucleotide in position 2 and the nucleotide in position 3 are linked through a phosphorothiate "
  variation 3: /note="A in position 3 is a 2'-O-Methyladenosine (mA)"
  variation 3: /note="the nucleotide in position 3 and the nucleotide in position 2 are linked through a phosphorothiate linkage "
  variation 4: /note="U in position 4 is a 2'- fluoro-uridine (fU)"
  variation 5: /note="A in position 5 is a 2'-O-Methyladenosine (mA)"
  variation 6: /note="G in position 6 is a 2'-fluoro-guanosine (fG)"
  variation 7: /note="A in position 7 is a 2'-O-Methyladenosine (mA)"
  variation 8: /note="G in position 8 is a 2'-fluoro-guanosine (fG)"
  variation 9: /note="C in position 9 is a 2'-O-Methylcytidine (mC)"
  variation 10: /note="A in position 10 is a 2'-fluoro-adenosine (fA)"
  variation 11: /note="A in position 11 is a 2'-O-Methyladenosine (mA)"
  variation 12: /note="G in position 12 is a 2'-O-Methylguanosine (mG)"
  variation 13: /note="A in position 13 is a 2'-O-Methyladenosine (mA)"
  variation 14: /note="A in position 14 is a 2'-fluoro-adenosine (fA)"
  variation 15: /note="C in position 15 is a 2'-O-Methylcytidine (mC)"
  variation 16: /note="A in position 16 is a 2'-fluoro-adenosine (fA)"
  variation 17: /note="C in position 17 is a lC4b analog"
  variation 18: /note="U in position 18 is a 2'- fluoro-uridine (fU)"
  variation 19: /note="G in position 19 is a 2'-O-Methylguanosine (mG)"
  variation 20: /note="U in position 20 is a 2'- fluoro-uridine (fU)"
  variation 21: /note="U in position 21 is a 2'-O-Methyluridine (mU)"
  variation 21: /note="the nucleotide in position 21 and the nucleotide in position 22 are linked through a phosphorothiate linkage "
  variation 22: /note="U in position 22 is a 2'-O-Methyluridine (mU)"
  variation 22: /note="the nucleotide in position 22 and the nucleotide in position 21 are linked through a phosphorothiate linkage "
  variation 22: /note="the nucleotide in position 22 and the nucleotide in position 23 are linked through a phosphorothiate linkage "
  variation 23: /note="U in position 23 is a 2'-O-Methyluridine (mU)"
  variation 23: /note="the nucleotide in position 23 and the nucleotide in position 22 are linked through a phosphorothiate linkage "
uuauagagcaagaacacuguuuu

SEQ ID NO: 87 - RNA, 23 nt, Artificial Sequence
  as3-19
  variation 1: /note="U in position 1 is a 2'-O-Methyluridine (mU)"
  variation 1: /note="the nucleotide in position 1 and the nucleotide in position 2 are linked through a phosphorothiate linkage "
  variation 2: /note="U in position 2 is a 2'- fluoro-uridine (fU)"
  variation 2: /note="the nucleotide in position 2 and the nucleotide in position 1 are linked through a phosphorothiate "
  variation 2: /note="the nucleotide in position 2 and the nucleotide in position 3 are linked through a phosphorothiate "
  variation 3: /note="A in position 3 is a 2'-O-Methyladenosine (mA)"
  variation 3: /note="the nucleotide in position 3 and the nucleotide in position 2 are linked through a phosphorothiate linkage "
  variation 4: /note="U in position 4 is a 2'- fluoro-uridine (fU)"
  variation 5: /note="A in position 5 is a 2'-O-Methyladenosine (mA)"
  variation 6: /note="G in position 6 is a 2'-fluoro-guanosine (fG)"
  variation 7: /note="A in position 7 is a 2'-O-Methyladenosine (mA)"
  variation 8: /note="G in position 8 is a 2'-fluoro-guanosine (fG)"
  variation 9: /note="C in position 9 is a 2'-O-Methylcytidine (mC)"
  variation 10: /note="A in position 10 is a 2'-fluoro-adenosine (fA)"
  variation 11: /note="A in position 11 is a 2'-O-Methyladenosine (mA)"
  variation 12: /note="G in position 12 is a 2'-O-Methylguanosine (mG)"
  variation 13: /note="A in position 13 is a 2'-O-Methyladenosine (mA)"
  variation 14: /note="A in position 14 is a 2'-fluoro-adenosine (fA)"
  variation 15: /note="C in position 15 is a 2'-O-Methylcytidine (mC)"
  variation 16: /note="A in position 16 is a 2'-fluoro-adenosine (fA)"
  variation 17: /note="C in position 17 is a 2'-O-Methylcytidine (mC)"
  variation 18: /note="U in position 18 is a lU4b analog"
  variation 19: /note="G in position 19 is a 2'-O-Methylguanosine (mG)"
  variation 20: /note="U in position 20 is a 2'- fluoro-uridine (fU)"
  variation 21: /note="U in position 21 is a 2'-O-Methyluridine (mU)"
  variation 21: /note="the nucleotide in position 21 and the nucleotide in position 22 are linked through a phosphorothiate linkage "
  variation 22: /note="U in position 22 is a 2'-O-Methyluridine (mU)"
  variation 22: /note="the nucleotide in position 22 and the nucleotide in position 21 are linked through a phosphorothiate linkage "
  variation 22: /note="the nucleotide in position 22 and the nucleotide in position 23 are linked through a phosphorothiate linkage "
  variation 23: /note="U in position 23 is a 2'-O-Methyluridine (mU)"
  variation 23: /note="the nucleotide in position 23 and the nucleotide in position 22 are linked through a phosphorothiate linkage "
uuauagagcaagaacacuguuuu

SEQ ID NO: 88 - RNA, 23 nt, Artificial Sequence
  as3-20
  variation 1: /note="U in position 1 is a 2'-O-Methyluridine (mU)"
  variation 1: /note="the nucleotide in position 1 and the nucleotide in position 2 are linked through a phosphorothiate linkage "
  variation 2: /note="U in position 2 is a 2'- fluoro-uridine (fU)"
  variation 2: /note="the nucleotide in position 2 and the nucleotide in position 1 are linked through a phosphorothiate "
  variation 2: /note="the nucleotide in position 2 and the nucleotide in position 3 are linked through a phosphorothiate "
  variation 3: /note="A in position 3 is a 2'-O-Methyladenosine (mA)"
  variation 3: /note="the nucleotide in position 3 and the nucleotide in position 2 are linked through a phosphorothiate linkage "
  variation 4: /note="U in position 4 is a 2'- fluoro-uridine (fU)"
  variation 5: /note="A in position 5 is a 2'-O-Methyladenosine (mA)"
  variation 6: /note="G in position 6 is a 2'-fluoro-guanosine (fG)"
  variation 7: /note="A in position 7 is a 2'-O-Methyladenosine (mA)"
  variation 8: /note="G in position 8 is a 2'-fluoro-guanosine (fG)"
  variation 9: /note="C in position 9 is a 2'-O-Methylcytidine (mC)"
  variation 10: /note="A in position 10 is a 2'-fluoro-adenosine (fA)"
  variation 11: /note="A in position 11 is a 2'-O-Methyladenosine (mA)"
  variation 12: /note="G in position 12 is a 2'-O-Methylguanosine (mG)"
  variation 13: /note="A in position 13 is a 2'-O-Methyladenosine (mA)"
  variation 14: /note="A in position 14 is a 2'-fluoro-adenosine (fA)"
  variation 15: /note="C in position 15 is a 2'-O-Methylcytidine (mC)"
  variation 16: /note="A in position 16 is a 2'-fluoro-adenosine (fA)"
  variation 17: /note="C in position 17 is a 2'-O-Methylcytidine (mC)"
  variation 18: /note="U in position 18 is a 2'- fluoro-uridine (fU)"
  variation 19: /note="G in position 19 is a lG4b analog"
  variation 20: /note="U in position 20 is a 2'- fluoro-uridine (fU)"
  variation 21: /note="U in position 21 is a 2'-O-Methyluridine (mU)"
  variation 21: /note="the nucleotide in position 21 and the nucleotide in position 22 are linked through a phosphorothiate linkage "
  variation 22: /note="U in position 22 is a 2'-O-Methyluridine (mU)"
  variation 22: /note="the nucleotide in position 22 and the nucleotide in position 21 are linked through a phosphorothiate linkage "
  variation 22: /note="the nucleotide in position 22 and the nucleotide in position 23 are linked through a phosphorothiate linkage "
  variation 23: /note="U in position 23 is a 2'-O-Methyluridine (mU)"
  variation 23: /note="the nucleotide in position 23 and the nucleotide in position 22 are linked through a phosphorothiate linkage "
uuauagagcaagaacacuguuuu

SEQ ID NO: 89 - RNA, 23 nt, Artificial Sequence
  as3-21
  variation 1: /note="U in position 1 is a 2'-O-Methyluridine (mU)"
  variation 1: /note="the nucleotide in position 1 and the nucleotide in position 2 are linked through a phosphorothiate linkage "
  variation 2: /note="U in position 2 is a 2'- fluoro-uridine (fU)"
  variation 2: /note="the nucleotide in position 2 and the nucleotide in position 1 are linked through a phosphorothiate "
  variation 2: /note="the nucleotide in position 2 and the nucleotide in position 3 are linked through a phosphorothiate "
  variation 3: /note="A in position 3 is a 2'-O-Methyladenosine (mA)"
  variation 3: /note="the nucleotide in position 3 and the nucleotide in position 2 are linked through a phosphorothiate linkage "
  variation 4: /note="U in position 4 is a 2'- fluoro-uridine (fU)"
  variation 5: /note="A in position 5 is a 2'-O-Methyladenosine (mA)"
  variation 6: /note="G in position 6 is a 2'-fluoro-guanosine (fG)"
  variation 7: /note="A in position 7 is a 2'-O-Methyladenosine (mA)"
  variation 8: /note="G in position 8 is a 2'-fluoro-guanosine (fG)"
  variation 9: /note="C in position 9 is a 2'-O-Methylcytidine (mC)"
  variation 10: /note="A in position 10 is a 2'-fluoro-adenosine (fA)"
  variation 11: /note="A in position 11 is a 2'-O-Methyladenosine (mA)"
  variation 12: /note="G in position 12 is a 2'-O-Methylguanosine (mG)"
  variation 13: /note="A in position 13 is a 2'-O-Methyladenosine (mA)"
  variation 14: /note="A in position 14 is a 2'-fluoro-adenosine (fA)"
  variation 15: /note="C in position 15 is a 2'-O-Methylcytidine (mC)"
  variation 16: /note="A in position 16 is a 2'-fluoro-adenosine (fA)"
  variation 17: /note="C in position 17 is a 2'-O-Methylcytidine (mC)"
  variation 18: /note="U in position 18 is a 2'- fluoro-uridine (fU)"
  variation 19: /note="G in position 19 is a 2'-O-Methylguanosine (mG)"
  variation 20: /note="U in position 20 is a lU4b analog"
  variation 21: /note="U in position 21 is a 2'-O-Methyluridine (mU)"
  variation 21: /note="the nucleotide in position 21 and the nucleotide in position 22 are linked through a phosphorothiate linkage "
  variation 22: /note="U in position 22 is a 2'-O-Methyluridine (mU)"
  variation 22: /note="the nucleotide in position 22 and the nucleotide in position 21 are linked through a phosphorothiate linkage "
  variation 22: /note="the nucleotide in position 22 and the nucleotide in position 23 are linked through a phosphorothiate linkage "
  variation 23: /note="U in position 23 is a 2'-O-Methyluridine (mU)"
  variation 23: /note="the nucleotide in position 23 and the nucleotide in position 22 are linked through a phosphorothiate linkage "
uuauagagcaagaacacuguuuu

SEQ ID NO: 90 - RNA, 23 nt, Artificial Sequence
  as3-22
  variation 1: /note="U in position 1 is a 2'-O-Methyluridine (mU)"
  variation 1: /note="the nucleotide in position 1 and the nucleotide in position 2 are linked through a phosphorothiate linkage "
  variation 2: /note="U in position 2 is a 2'- fluoro-uridine (fU)"
  variation 2: /note="the nucleotide in position 2 and the nucleotide in position 1 are linked through a phosphorothiate "
  variation 2: /note="the nucleotide in position 2 and the nucleotide in position 3 are linked through a phosphorothiate "
  variation 3: /note="A in position 3 is a 2'-O-Methyladenosine (mA)"
  variation 3: /note="the nucleotide in position 3 and the nucleotide in position 2 are linked through a phosphorothiate linkage "
  variation 4: /note="U in position 4 is a 2'- fluoro-uridine (fU)"
  variation 5: /note="A in position 5 is a 2'-O-Methyladenosine (mA)"
  variation 6: /note="G in position 6 is a 2'-fluoro-guanosine (fG)"
  variation 7: /note="A in position 7 is a 2'-O-Methyladenosine (mA)"
  variation 8: /note="G in position 8 is a 2'-fluoro-guanosine (fG)"
  variation 9: /note="C in position 9 is a 2'-O-Methylcytidine (mC)"
  variation 10: /note="A in position 10 is a 2'-fluoro-adenosine (fA)"
  variation 11: /note="A in position 11 is a 2'-O-Methyladenosine (mA)"
  variation 12: /note="G in position 12 is a 2'-O-Methylguanosine (mG)"
  variation 13: /note="A in position 13 is a 2'-O-Methyladenosine (mA)"
  variation 14: /note="A in position 14 is a 2'-fluoro-adenosine (fA)"
  variation 15: /note="C in position 16 is a 2'-O-Methylcytidine (mC)"
  variation 16: /note="A in position 16 is a 2'-fluoro-adenosine (fA)"
  variation 17: /note="C in position 17 is a 2'-O-Methylcytidine (mC)"
  variation 18: /note="U in position 18 is a 2'- fluoro-uridine (fU)"
  variation 19: /note="G in position 19 is a 2'-O-Methylguanosine (mG)"
  variation 20: /note="U in position 20 is a 2'- fluoro-uridine (fU)"
  variation 21: /note="U in position 21 is a lU4b analog"
  variation 21: /note="the nucleotide in position 21 and the nucleotide in position 22 are linked through a phosphorothiate linkage "
  variation 22: /note="U in position 22 is a 2'-O-Methyluridine (mU)"
  variation 22: /note="the nucleotide in position 22 and the nucleotide in position 21 are linked through a phosphorothiate linkage "
  variation 22: /note="the nucleotide in position 22 and the nucleotide in position 23 are linked through a phosphorothiate linkage "
  variation 23: /note="U in position 23 is a 2'-O-Methyluridine (mU)"
  variation 23: /note="the nucleotide in position 23 and the nucleotide in position 22 are linked through a phosphorothiate linkage "
uuauagagcaagaacacuguuuu

SEQ ID NO: 91 - RNA, 23 nt, Artificial Sequence
  as3-23
  variation 1: /note="U in position 1 is a lU4b analog"
  variation 1: /note="the nucleotide in position 1 and the nucleotide in position 2 are linked through a phosphorothiate linkage "
  variation 2: /note="U in position 2 is a 2'- fluoro-uridine (fU)"
  variation 2: /note="the nucleotide in position 2 and the nucleotide in position 1 are linked through a phosphorothiate "
  variation 2: /note="the nucleotide in position 2 and the nucleotide in position 3 are linked through a phosphorothiate "
  variation 3: /note="A in position 3 is a 2'-O-Methyladenosine (mA)"
  variation 3: /note="the nucleotide in position 3 and the nucleotide in position 2 are linked through a phosphorothiate linkage "
  variation 4: /note="U in position 4 is a 2'- fluoro-uridine (fU)"
  variation 5: /note="A in position 5 is a 2'-O-Methyladenosine (mA)"
  variation 6: /note="G in position 6 is a 2'-fluoro-guanosine (fG)"
  variation 7: /note="A in position 7 is a lA4b analog"
  variation 8: /note="G in position 8 is a 2'-fluoro-guanosine (fG)"
  variation 9: /note="C in position 9 is a 2'-O-Methylcytidine (mC)"
  variation 10: /note="A in position 10 is a 2'-fluoro-adenosine (fA)"
  variation 11: /note="A in position 11 is a 2'-O-Methyladenosine (mA)"
  variation 12: /note="G in position 12 is a 2'-O-Methylguanosine (mG)"
  variation 13: /note="A in position 13 is a 2'-O-Methyladenosine (mA)"
  variation 14: /note="A in position 14 is a 2'-fluoro-adenosine (fA)"
  variation 15: /note="C in position 15 is a 2'-O-Methylcytidine (mC)"
  variation 16: /note="A in position 16 is a 2'-fluoro-adenosine (fA)"
  variation 17: /note="C in position 17 is a 2'-O-Methylcytidine (mC)"
  variation 18: /note="U in position 18 is a 2'- fluoro-uridine (fU)"
  variation 19: /note="G in position 19 is a 2'-O-Methylguanosine (mG)"
  variation 20: /note="U in position 20 is a 2'- fluoro-uridine (fU)"
  variation 21: /note="U in position 21 is a 2'-O-Methyluridine (mU)"
  variation 21: /note="the nucleotide in position 21 and the nucleotide in position 22 are linked through a phosphorothiate linkage "
  variation 22: /note="U in position 22 is a 2'-O-Methyluridine (mU)"
  variation 22: /note="the nucleotide in position 22 and the nucleotide in position 21 are linked through a phosphorothiate linkage "
  variation 22: /note="the nucleotide in position 22 and the nucleotide in position 23 are linked through a phosphorothiate linkage "
  variation 23: /note="U in position 23 is a 2'-O-Methyluridine (mU)"
  variation 23: /note="the nucleotide in position 23 and the nucleotide in position 22 are linked through a phosphorothiate linkage "
uuauagagcaagaacacuguuuu

SEQ ID NO: 92 - RNA, 23 nt, Artificial Sequence
  as3-24
  variation 1: /note="U in position 1 is a 2'-O-Methyluridine (mU)"
  variation 1: /note="the nucleotide in position 1 and the nucleotide in position 2 are linked through a phosphorothiate linkage "
  variation 2: /note="U in position 2 is a lU4b analog"
  variation 2: /note="the nucleotide in position 2 and the nucleotide in position 1 are linked through a phosphorothiate "
  variation 2: /note="the nucleotide in position 2 and the nucleotide in position 3 are linked through a phosphorothiate "
  variation 3: /note="A in position 3 is a 2'-O-Methyladenosine (mA)"
  variation 3: /note="the nucleotide in position 3 and the nucleotide in position 2 are linked through a phosphorothiate linkage "
  variation 4: /note="U in position 4 is a 2'- fluoro-uridine (fU)"
  variation 5: /note="A in position 5 is a 2'-O-Methyladenosine (mA)"
  variation 6: /note="G in position 6 is a 2'-fluoro-guanosine (fG)"
  variation 7: /note="A in position 7 is a lA4b analog"
  variation 8: /note="G in position 8 is a 2'-fluoro-guanosine (fG)"
  variation 9: /note="C in position 9 is a 2'-O-Methylcytidine (mC)"
  variation 10: /note="A in position 10 is a 2'-fluoro-adenosine (fA)"
  variation 11: /note="A in position 11 is a 2'-O-Methyladenosine (mA)"
  variation 12: /note="G in position 12 is a 2'-O-Methylguanosine (mG)"
  variation 13: /note="A in position 13 is a 2'-O-Methyladenosine (mA)"
  variation 14: /note="A in position 14 is a 2'-fluoro-adenosine (fA)"
  variation 15: /note="C in position 15 is a 2'-O-Methylcytidine (mC)"
  variation 16: /note="A in position 16 is a 2'-fluoro-adenosine (fA)"
  variation 17: /note="C in position 17 is a 2'-O-Methylcytidine (mC)"
  variation 18: /note="U in position 18 is a 2'- fluoro-uridine (fU)"
  variation 19: /note="G in position 19 is a 2'-O-Methylguanosine (mG)"
  variation 20: /note="U in position 20 is a 2'- fluoro-uridine (fU)"
  variation 21: /note="U in position 21 is a 2'-O-Methyluridine (mU)"
  variation 21: /note="the nucleotide in position 21 and the nucleotide in position 22 are linked through a phosphorothiate linkage "
  variation 22: /note="U in position 22 is a 2'-O-Methyluridine (mU)"
  variation 22: /note="the nucleotide in position 22 and the nucleotide in position 21 are linked through a phosphorothiate linkage "
  variation 22: /note="the nucleotide in position 22 and the nucleotide in position 23 are linked through a phosphorothiate linkage "
  variation 23: /note="U in position 23 is a 2'-O-Methyluridine (mU)"
  variation 23: /note="the nucleotide in position 23 and the nucleotide in position 22 are linked through a phosphorothiate linkage "
uuauagagcaagaacacuguuuu

SEQ ID NO: 93 - RNA, 23 nt, Artificial Sequence
  as3-25
  variation 1: /note="U in position 1 is a 2'-O-Methyluridine (mU)"
  variation 1: /note="the nucleotide in position 1 and the nucleotide in position 2 are linked through a phosphorothiate linkage "
  variation 2: /note="U in position 2 is a 2'- fluoro-uridine (fU)"
  variation 2: /note="the nucleotide in position 2 and the nucleotide in position 1 are linked through a phosphorothiate "
  variation 2: /note="the nucleotide in position 2 and the nucleotide in position 3 are linked through a phosphorothiate "
  variation 3: /note="A in position 3 is a lA4b analog"
  variation 3: /note="the nucleotide in position 3 and the nucleotide in position 2 are linked through a phosphorothiate linkage "
  variation 4: /note="U in position 4 is a 2'- fluoro-uridine (fU)"
  variation 5: /note="A in position 5 is a 2'-O-Methyladenosine (mA)"
  variation 6: /note="G in position 6 is a 2'-fluoro-guanosine (fG)"
  variation 7: /note="A in position 7 is a lA4b analog"
  variation 8: /note="G in position 8 is a 2'-fluoro-guanosine (fG)"
  variation 9: /note="C in position 9 is a 2'-O-Methylcytidine (mC)"
  variation 10: /note="A in position 10 is a 2'-fluoro-adenosine (fA)"
  variation 11: /note="A in position 11 is a 2'-O-Methyladenosine (mA)"
  variation 12: /note="G in position 12 is a 2'-O-Methylguanosine (mG)"
  variation 13: /note="A in position 13 is a 2'-O-Methyladenosine (mA)"
  variation 14: /note="A in position 14 is a 2'-fluoro-adenosine (fA)"
  variation 15: /note="C in position 15 is a 2'-O-Methylcytidine (mC)"
  variation 16: /note="A in position 16 is a 2'-fluoro-adenosine (fA)"
  variation 17: /note="C in position 17 is a 2'-O-Methylcytidine (mC)"
  variation 18: /note="U in position 18 is a 2'- fluoro-uridine (fU)"
  variation 19: /note="G in position 19 is a 2'-O-Methylguanosine (mG)"
  variation 20: /note="U in position 20 is a 2'- fluoro-uridine (fU)"
  variation 21: /note="U in position 21 is a 2'-O-Methyluridine (mU)"
  variation 21: /note="the nucleotide in position 21 and the nucleotide in position 22 are linked through a phosphorothiate linkage "
  variation 22: /note="U in position 22 is a 2'-O-Methyluridine (mU)"
  variation 22: /note="the nucleotide in position 22 and the nucleotide in position 21 are linked through a phosphorothiate linkage "
  variation 22: /note="the nucleotide in position 22 and the nucleotide in position 23 are linked through a phosphorothiate linkage "
  variation 23: /note="U in position 23 is a 2'-O-Methyluridine (mU)"
  variation 23: /note="the nucleotide in position 23 and the nucleotide in position 22 are linked through a phosphorothiate linkage "
uuauagagcaagaacacuguuuu

SEQ ID NO: 94 - RNA, 23 nt, Artificial Sequence
  as3-26
  variation 1: /note="U in position 1 is a 2'-O-Methyluridine (mU)"
  variation 1: /note="the nucleotide in position 1 and the nucleotide in position 2 are linked through a phosphorothiate linkage "
  variation 2: /note="U in position 2 is a 2'- fluoro-uridine (fU)"
  variation 2: /note="the nucleotide in position 2 and the nucleotide in position 1 are linked through a phosphorothiate "
  variation 2: /note="the nucleotide in position 2 and the nucleotide in position 3 are linked through a phosphorothiate "
  variation 3: /note="A in position 3 is a 2'-O-Methyladenosine (mA)"
  variation 3: /note="the nucleotide in position 3 and the nucleotide in position 2 are linked through a phosphorothiate linkage "
  variation 4: /note="U in position 4 is a lU4b analog"
  variation 5: /note="A in position 5 is a 2'-O-Methyladenosine (mA)"
  variation 6: /note="G in position 6 is a 2'-fluoro-guanosine (fG)"
  variation 7: /note="A in position 7 is a lA4b analog"
  variation 8: /note="G in position 8 is a 2'-fluoro-guanosine (fG)"
  variation 9: /note="C in position 9 is a 2'-O-Methylcytidine (mC)"
  variation 10: /note="A in position 10 is a 2'-fluoro-adenosine (fA)"
  variation 11: /note="A in position 11 is a 2'-O-Methyladenosine (mA)"
  variation 12: /note="G in position 12 is a 2'-O-Methylguanosine (mG)"
  variation 13: /note="A in position 13 is a 2'-O-Methyladenosine (mA)"
  variation 14: /note="A in position 14 is a 2'-fluoro-adenosine (fA)"
  variation 15: /note="C in position 15 is a 2'-O-Methylcytidine (mC)"
  variation 16: /note="A in position 16 is a 2'-fluoro-adenosine (fA)"
  variation 17: /note="C in position 17 is a 2'-O-Methylcytidine (mC)"
  variation 18: /note="U in position 18 is a 2'- fluoro-uridine (fU)"
  variation 19: /note="G in position 19 is a 2'-O-Methylguanosine (mG)"
  variation 20: /note="U in position 20 is a 2'- fluoro-uridine (fU)"
  variation 21: /note="U in position 21 is a 2'-O-Methyluridine (mU)"
  variation 21: /note="the nucleotide in position 21 and the nucleotide in position 22 are linked through a phosphorothiate linkage "
  variation 22: /note="U in position 22 is a 2'-O-Methyluridine (mU)"
  variation 22: /note="the nucleotide in position 22 and the nucleotide in position 21 are linked through a phosphorothiate linkage "
  variation 22: /note="the nucleotide in position 22 and the nucleotide in position 23 are linked through a phosphorothiate linkage "
  variation 23: /note="U in position 23 is a 2'-O-Methyluridine (mU)"
  variation 23: /note="the nucleotide in position 23 and the nucleotide in position 22 are linked through a phosphorothiate linkage "
uuauagagcaagaacacuguuuu

SEQ ID NO: 95 - RNA, 23 nt, Artificial Sequence
  as3-27
  variation 1: /note="U in position 1 is a 2'-O-Methyluridine (mU)"
  variation 1: /note="the nucleotide in position 1 and the nucleotide in position 2 are linked through a phosphorothiate linkage "
  variation 2: /note="U in position 2 is a 2'- fluoro-uridine (fU)"
  variation 2: /note="the nucleotide in position 2 and the nucleotide in position 1 are linked through a phosphorothiate "
  variation 2: /note="the nucleotide in position 2 and the nucleotide in position 3 are linked through a phosphorothiate "
  variation 3: /note="A in position 3 is a 2'-O-Methyladenosine (mA)"
  variation 3: /note="the nucleotide in position 3 and the nucleotide in position 2 are linked through a phosphorothiate linkage "
  variation 4: /note="U in position 4 is a 2'- fluoro-uridine (fU)"
  variation 5: /note="A in position 5 is a lA4b analog"
  variation 6: /note="G in position 6 is a 2'-fluoro-guanosine (fG)"
  variation 7: /note="A in position 7 is a lA4b analog"
  variation 8: /note="G in position 8 is a 2'-fluoro-guanosine (fG)"
  variation 9: /note="C in position 9 is a 2'-O-Methylcytidine (mC)"
  variation 10: /note="A in position 10 is a 2'-fluoro-adenosine (fA)"
  variation 11: /note="A in position 11 is a 2'-O-Methyladenosine (mA)"
  variation 12: /note="G in position 12 is a 2'-O-Methylguanosine (mG)"
  variation 13: /note="A in position 13 is a 2'-O-Methyladenosine (mA)"
  variation 14: /note="A in position 14 is a 2'-fluoro-adenosine (fA)"
  variation 15: /note="C in position 15 is a 2'-O-Methylcytidine (mC)"
  variation 16: /note="A in position 16 is a 2'-fluoro-adenosine (fA)"
  variation 17: /note="C in position 17 is a 2'-O-Methylcytidine (mC)"
  variation 18: /note="U in position 18 is a 2'- fluoro-uridine (fU)"
  variation 19: /note="G in position 19 is a 2'-O-Methylguanosine (mG)"
  variation 20: /note="U in position 20 is a 2'- fluoro-uridine (fU)"
  variation 21: /note="U in position 21 is a 2'-O-Methyluridine (mU)"
  variation 21: /note="the nucleotide in position 21 and the nucleotide in position 22 are linked through a phosphorothiate linkage "
  variation 22: /note="U in position 22 is a 2'-O-Methyluridine (mU)"
  variation 22: /note="the nucleotide in position 22 and the nucleotide in position 21 are linked through a phosphorothiate linkage "
  variation 22: /note="the nucleotide in position 22 and the nucleotide in position 23 are linked through a phosphorothiate linkage "
  variation 23: /note="U in position 23 is a 2'-O-Methyluridine (mU)"
  variation 23: /note="the nucleotide in position 23 and the nucleotide in position 22 are linked through a phosphorothiate linkage "
uuauagagcaagaacacuguuuu

SEQ ID NO: 96 - RNA, 23 nt, Artificial Sequence
  as3-28
  variation 1: /note="U in position 1 is a 2'-O-Methyluridine (mU)"
  variation 1: /note="the nucleotide in position 1 and the nucleotide in position 2 are linked through a phosphorothiate linkage "
  variation 2: /note="U in position 2 is a 2'- fluoro-uridine (fU)"
  variation 2: /note="the nucleotide in position 2 and the nucleotide in position 1 are linked through a phosphorothiate "
  variation 2: /note="the nucleotide in position 2 and the nucleotide in position 3 are linked through a phosphorothiate "
  variation 3: /note="A in position 3 is a 2'-O-Methyladenosine (mA)"
  variation 3: /note="the nucleotide in position 3 and the nucleotide in position 2 are linked through a phosphorothiate linkage "
  variation 4: /note="U in position 4 is a 2'- fluoro-uridine (fU)"
  variation 5: /note="A in position 5 is a 2'-O-Methyladenosine (mA)"
  variation 6: /note="G in position 6 is a lG4b analog"
  variation 7: /note="A in position 7 is a lA4b analog"
  variation 8: /note="G in position 8 is a 2'-fluoro-guanosine (fG)"
  variation 9: /note="C in position 9 is a 2'-O-Methylcytidine (mC)"
  variation 10: /note="A in position 10 is a 2'-fluoro-adenosine (fA)"
  variation 11: /note="A in position 11 is a 2'-O-Methyladenosine (mA)"
  variation 12: /note="G in position 12 is a 2'-O-Methylguanosine (mG)"
  variation 13: /note="A in position 13 is a 2'-O-Methyladenosine (mA)"
  variation 14: /note="A in position 14 is a 2'-fluoro-adenosine (fA)"
  variation 15: /note="C in position 15 is a 2'-O-Methylcytidine (mC)"
  variation 16: /note="A in position 16 is a 2'-fluoro-adenosine (fA)"
  variation 17: /note="C in position 17 is a 2'-O-Methylcytidine (mC)"
  variation 18: /note="U in position 18 is a 2'- fluoro-uridine (fU)"
  variation 19: /note="G in position 19 is a 2'-O-Methylguanosine (mG)"
  variation 20: /note="U in position 20 is a 2'- fluoro-uridine (fU)"
  variation 21: /note="U in position 21 is a 2'-O-Methyluridine (mU)"
  variation 21: /note="the nucleotide in position 21 and the nucleotide in position 22 are linked through a phosphorothiate linkage "
  variation 22: /note="U in position 22 is a 2'-O-Methyluridine (mU)"
  variation 22: /note="the nucleotide in position 22 and the nucleotide in position 21 are linked through a phosphorothiate linkage "
  variation 22: /note="the nucleotide in position 22 and the nucleotide in position 23 are linked through a phosphorothiate linkage "
  variation 23: /note="U in position 23 is a 2'-O-Methyluridine (mU)"
  variation 23: /note="the nucleotide in position 23 and the nucleotide in position 22 are linked through a phosphorothiate linkage "
uuauagagcaagaacacuguuuu

SEQ ID NO: 97 - RNA, 23 nt, Artificial Sequence
  as3-29
  variation 1: /note="U in position 1 is a 2'-O-Methyluridine (mU)"
  variation 1: /note="the nucleotide in position 1 and the nucleotide in position 2 are linked through a phosphorothiate linkage "
  variation 2: /note="U in position 2 is a 2'- fluoro-uridine (fU)"
  variation 2: /note="the nucleotide in position 2 and the nucleotide in position 1 are linked through a phosphorothiate "
  variation 2: /note="the nucleotide in position 2 and the nucleotide in position 3 are linked through a phosphorothiate "
  variation 3: /note="A in position 3 is a 2'-O-Methyladenosine (mA)"
  variation 3: /note="the nucleotide in position 3 and the nucleotide in position 2 are linked through a phosphorothiate linkage "
  variation 4: /note="U in position 4 is a 2'- fluoro-uridine (fU)"
  variation 5: /note="A in position 5 is a 2'-O-Methyladenosine (mA)"
  variation 6: /note="G in position 6 is a 2'-fluoro-guanosine (fG)"
  variation 7: /note="A in position 7 is a lA4b analog"
  variation 8: /note="G in position 8 is a 2'-fluoro-guanosine (fG)"
  variation 9: /note="C in position 9 is a lC4b analog"
  variation 10: /note="A in position 10 is a 2'-fluoro-adenosine (fA)"
  variation 11: /note="A in position 11 is a 2'-O-Methyladenosine (mA)"
  variation 12: /note="G in position 12 is a 2'-O-Methylguanosine (mG)"
  variation 13: /note="A in position 13 is a 2'-O-Methyladenosine (mA)"
  variation 14: /note="A in position 14 is a 2'-fluoro-adenosine (fA)"
  variation 15: /note="C in position 15 is a 2'-O-Methylcytidine (mC)"
  variation 16: /note="A in position 16 is a 2'-fluoro-adenosine (fA)"
  variation 17: /note="C in position 17 is a 2'-O-Methylcytidine (mC)"
  variation 18: /note="U in position 18 is a 2'- fluoro-uridine (fU)"
  variation 19: /note="G in position 19 is a 2'-O-Methylguanosine (mG)"
  variation 20: /note="U in position 20 is a 2'- fluoro-uridine (fU)"
  variation 21: /note="U in position 21 is a 2'-O-Methyluridine (mU)"
  variation 21: /note="the nucleotide in position 21 and the nucleotide in position 22 are linked through a phosphorothiate linkage "
  variation 22: /note="U in position 22 is a 2'-O-Methyluridine (mU)"
  variation 22: /note="the nucleotide in position 22 and the nucleotide in position 21 are linked through a phosphorothiate linkage "
  variation 22: /note="the nucleotide in position 22 and the nucleotide in position 23 are linked through a phosphorothiate linkage "
  variation 23: /note="U in position 23 is a 2'-O-Methyluridine (mU)"
  variation 23: /note="the nucleotide in position 23 and the nucleotide in position 22 are linked through a phosphorothiate linkage "
uuauagagcaagaacacuguuuu

SEQ ID NO: 98 - RNA, 23 nt, Artificial Sequence
  as3-30
  variation 1: /note="U in position 1 is a 2'-O-Methyluridine (mU)"
  variation 1: /note="the nucleotide in position 1 and the nucleotide in position 2 are linked through a phosphorothiate linkage "
  variation 2: /note="U in position 2 is a 2'- fluoro-uridine (fU)"
  variation 2: /note="the nucleotide in position 2 and the nucleotide in position 1 are linked through a phosphorothiate "
  variation 2: /note="the nucleotide in position 2 and the nucleotide in position 3 are linked through a phosphorothiate "
  variation 3: /note="A in position 3 is a 2'-O-Methyladenosine (mA)"
  variation 3: /note="the nucleotide in position 3 and the nucleotide in position 2 are linked through a phosphorothiate linkage "
  variation 4: /note="U in position 4 is a 2'- fluoro-uridine (fU)"
  variation 5: /note="A in position 5 is a 2'-O-Methyladenosine (mA)"
  variation 6: /note="G in position 6 is a 2'-fluoro-guanosine (fG)"
  variation 7: /note="A in position 7 is a lA4b analog"
  variation 8: /note="G in position 8 is a 2'-fluoro-guanosine (fG)"
  variation 9: /note="C in position 9 is a 2'-O-Methylcytidine (mC)"
  variation 10: /note="A in position 10 is a lA4b analolg"
  variation 11: /note="A in position 11 is a 2'-O-Methyladenosine (mA)"
  variation 12: /note="G in position 12 is a 2'-O-Methylguanosine (mG)"
  variation 13: /note="A in position 13 is a 2'-O-Methyladenosine (mA)"
  variation 14: /note="A in position 14 is a 2'-fluoro-adenosine (fA)"
  variation 15: /note="C in position 15 is a 2'-O-Methylcytidine (mC)"
  variation 16: /note="A in position 16 is a 2'-fluoro-adenosine (fA)"
  variation 17: /note="C in position 17 is a 2'-O-Methylcytidine (mC)"
  variation 18: /note="U in position 18 is a 2'- fluoro-uridine (fU)"
  variation 19: /note="G in position 19 is a 2'-O-Methylguanosine (mG)"
  variation 20: /note="U in position 20 is a 2'- fluoro-uridine (fU)"
  variation 21: /note="U in position 21 is a 2'-O-Methyluridine (mU)"
  variation 21: /note="the nucleotide in position 21 and the nucleotide in position 22 are linked through a phosphorothiate linkage "
  variation 22: /note="U in position 22 is a 2'-O-Methyluridine (mU)"
  variation 22: /note="the nucleotide in position 22 and the nucleotide in position 21 are linked through a phosphorothiate linkage "
  variation 22: /note="the nucleotide in position 22 and the nucleotide in position 23 are linked through a phosphorothiate linkage "
  variation 23: /note="U in position 23 is a 2'-O-Methyluridine (mU)"
  variation 23: /note="the nucleotide in position 23 and the nucleotide in position 22 are linked through a phosphorothiate linkage "
uuauagagcaagaacacuguuuu

SEQ ID NO: 99 - RNA, 23 nt, Artificial Sequence
  as3-31
  variation 1: /note="U in position 1 is a 2'-O-Methyluridine (mU)"
  variation 1: /note="the nucleotide in position 1 and the nucleotide in position 2 are linked through a phosphorothiate linkage "
  variation 2: /note="U in position 2 is a 2'- fluoro-uridine (fU)"
  variation 2: /note="the nucleotide in position 2 and the nucleotide in position 1 are linked through a phosphorothiate "
  variation 2: /note="the nucleotide in position 2 and the nucleotide in position 3 are linked through a phosphorothiate "
  variation 3: /note="A in position 3 is a 2'-O-Methyladenosine (mA)"
  variation 3: /note="the nucleotide in position 3 and the nucleotide in position 2 are linked through a phosphorothiate linkage "
  variation 4: /note="U in position 4 is a 2'- fluoro-uridine (fU)"
  variation 5: /note="A in position 5 is a 2'-O-Methyladenosine (mA)"
  variation 6: /note="G in position 6 is a 2'-fluoro-guanosine (fG)"
  variation 7: /note="A in position 7 is a lA4b analog"
  variation 8: /note="G in position 8 is a 2'-fluoro-guanosine (fG)"
  variation 9: /note="C in position 9 is a 2'-O-Methylcytidine (mC)"
  variation 10: /note="A in position 10 is a 2'-fluoro-adenosine (fA)"
  variation 11: /note="A in position 11 is a lA4b analog"
  variation 12: /note="G in position 12 is a 2'-O-Methylguanosine (mG)"
  variation 13: /note="A in position 13 is a 2'-O-Methyladenosine (mA)"
  variation 14: /note="A in position 14 is a 2'-fluoro-adenosine (fA)"
  variation 15: /note="C in position 15 is a 2'-O-Methylcytidine (mC)"
  variation 16: /note="A in position 16 is a 2'-fluoro-adenosine (fA)"
  variation 17: /note="C in position 17 is a 2'-O-Methylcytidine (mC)"
  variation 18: /note="U in position 18 is a 2'- fluoro-uridine (fU)"
  variation 19: /note="G in position 19 is a 2'-O-Methylguanosine (mG)"
  variation 20: /note="U in position 20 is a 2'- fluoro-uridine (fU)"
  variation 21: /note="U in position 21 is a 2'-O-Methyluridine (mU)"
  variation 21: /note="the nucleotide in position 21 and the nucleotide in position 22 are linked through a phosphorothiate linkage "
  variation 22: /note="U in position 22 is a 2'-O-Methyluridine (mU)"
  variation 22: /note="the nucleotide in position 22 and the nucleotide in position 21 are linked through a phosphorothiate linkage "
  variation 22: /note="the nucleotide in position 22 and the nucleotide in position 23 are linked through a phosphorothiate linkage "
  variation 23: /note="U in position 23 is a 2'-O-Methyluridine (mU)"
  variation 23: /note="the nucleotide in position 23 and the nucleotide in position 22 are linked through a phosphorothiate linkage "
uuauagagcaagaacacuguuuu

SEQ ID NO: 100 - RNA, 23 nt, Artificial Sequence
  as3-32
  variation 1: /note="U in position 1 is a 2'-O-Methyluridine (mU)"
  variation 1: /note="the nucleotide in position 1 and the nucleotide in position 2 are linked through a phosphorothiate linkage "
  variation 2: /note="U in position 2 is a 2'- fluoro-uridine (fU)"
  variation 2: /note="the nucleotide in position 2 and the nucleotide in position 1 are linked through a phosphorothiate "
  variation 2: /note="the nucleotide in position 2 and the nucleotide in position 3 are linked through a phosphorothiate "
  variation 3: /note="A in position 3 is a 2'-O-Methyladenosine (mA)"
  variation 3: /note="the nucleotide in position 3 and the nucleotide in position 2 are linked through a phosphorothiate linkage "
  variation 4: /note="U in position 4 is a 2'- fluoro-uridine (fU)"
  variation 5: /note="A in position 5 is a 2'-O-Methyladenosine (mA)"
  variation 6: /note="G in position 6 is a 2'-fluoro-guanosine (fG)"
  variation 7: /note="A in position 7 is a lA4b analog"
  variation 8: /note="G in position 8 is a 2'-fluoro-guanosine (fG)"
  variation 9: /note="C in position 9 is a 2'-O-Methylcytidine (mC)"
  variation 10: /note="A in position 10 is a 2'-fluoro-adenosine (fA)"
  variation 11: /note="A in position 11 is a 2'-O-Methyladenosine (mA)"
  variation 12: /note="G in position 12 is a lG4b analog"
  variation 13: /note="A in position 13 is a 2'-O-Methyladenosine (mA)"
  variation 14: /note="A in position 14 is a 2'-fluoro-adenosine (fA)"
  variation 15: /note="C in position 15 is a 2'-O-Methylcytidine (mC)"
  variation 16: /note="A in position 16 is a 2'-fluoro-adenosine (fA)"
  variation 17: /note="C in position 17 is a 2'-O-Methylcytidine (mC)"
  variation 18: /note="U in position 18 is a 2'- fluoro-uridine (fU)"
  variation 19: /note="G in position 19 is a 2'-O-Methylguanosine (mG)"
  variation 20: /note="U in position 20 is a 2'- fluoro-uridine (fU)"
  variation 21: /note="U in position 21 is a 2'-O-Methyluridine (mU)"
  variation 21: /note="the nucleotide in position 21 and the nucleotide in position 22 are linked through a phosphorothiate linkage "
  variation 22: /note="U in position 22 is a 2'-O-Methyluridine (mU)"
  variation 22: /note="the nucleotide in position 22 and the nucleotide in position 21 are linked through a phosphorothiate linkage "
  variation 22: /note="the nucleotide in position 22 and the nucleotide in position 23 are linked through a phosphorothiate linkage "
  variation 23: /note="U in position 23 is a 2'-O-Methyluridine (mU)"
  variation 23: /note="the nucleotide in position 23 and the nucleotide in position 22 are linked through a phosphorothiate linkage "
uuauagagcaagaacacuguuuu

SEQ ID NO: 101 - RNA, 23 nt, Artificial Sequence
  as3-33
  variation 1: /note="U in position 1 is a 2'-O-Methyluridine (mU)"
  variation 1: /note="the nucleotide in position 1 and the nucleotide in position 2 are linked through a phosphorothiate linkage "
  variation 2: /note="U in position 2 is a 2'- fluoro-uridine (fU)"
  variation 2: /note="the nucleotide in position 2 and the nucleotide in position 1 are linked through a phosphorothiate "
  variation 2: /note="the nucleotide in position 2 and the nucleotide in position 3 are linked through a phosphorothiate "
  variation 3: /note="A in position 3 is a 2'-O-Methyladenosine (mA)"
  variation 3: /note="the nucleotide in position 3 and the nucleotide in position 2 are linked through a phosphorothiate linkage "
  variation 4: /note="U in position 4 is a 2'- fluoro-uridine (fU)"
  variation 5: /note="A in position 5 is a 2'-O-Methyladenosine (mA)"
  variation 6: /note="G in position 6 is a 2'-fluoro-guanosine (fG)"
  variation 7: /note="A in position 7 is a lA4b analog"
  variation 8: /note="G in position 8 is a 2'-fluoro-guanosine (fG)"
  variation 9: /note="C in position 9 is a 2'-O-Methylcytidine (mC)"
  variation 10: /note="A in position 10 is a 2'-fluoro-adenosine (fA)"
  variation 11: /note="A in position 11 is a 2'-O-Methyladenosine (mA)"
  variation 12: /note="G in position 12 is a 2'-O-Methylguanosine (mG)"
  variation 13: /note="A in position 13 is a lA4b analog"
  variation 14: /note="A in position 14 is a 2'-fluoro-adenosine (fA)"
  variation 15: /note="C in position 15 is a 2'-O-Methylcytidine (mC)"
  variation 16: /note="A in position 16 is a 2'-fluoro-adenosine (fA)"
  variation 17: /note="C in position 17 is a 2'-O-Methylcytidine (mC)"
  variation 18: /note="U in position 18 is a 2'- fluoro-uridine (fU)"
  variation 19: /note="G in position 19 is a 2'-O-Methylguanosine (mG)"
  variation 20: /note="U in position 20 is a 2'- fluoro-uridine (fU)"
  variation 21: /note="U in position 21 is a 2'-O-Methyluridine (mU)"
  variation 21: /note="the nucleotide in position 21 and the nucleotide in position 22 are linked through a phosphorothiate linkage "
  variation 22: /note="U in position 22 is a 2'-O-Methyluridine (mU)"
  variation 22: /note="the nucleotide in position 22 and the nucleotide in position 21 are linked through a phosphorothiate linkage "
  variation 22: /note="the nucleotide in position 22 and the nucleotide in position 23 are linked through a phosphorothiate linkage "
  variation 23: /note="U in position 23 is a 2'-O-Methyluridine (mU)"
  variation 23: /note="the nucleotide in position 23 and the nucleotide in position 22 are linked through a phosphorothiate linkage "
uuauagagcaagaacacuguuuu

SEQ ID NO: 102 - RNA, 23 nt, Artificial Sequence
  as3-34
  variation 1: /note="U in position 1 is a 2'-O-Methyluridine (mU)"
  variation 1: /note="the nucleotide in position 1 and the nucleotide in position 2 are linked through a phosphorothiate linkage "
  variation 2: /note="U in position 2 is a 2'- fluoro-uridine (fU)"
  variation 2: /note="the nucleotide in position 2 and the nucleotide in position 1 are linked through a phosphorothiate "
  variation 2: /note="the nucleotide in position 2 and the nucleotide in position 3 are linked through a phosphorothiate "
  variation 3: /note="A in position 3 is a 2'-O-Methyladenosine (mA)"
  variation 3: /note="the nucleotide in position 3 and the nucleotide in position 2 are linked through a phosphorothiate linkage "
  variation 4: /note="U in position 4 is a 2'- fluoro-uridine (fU)"
  variation 5: /note="A in position 5 is a 2'-O-Methyladenosine (mA)"
  variation 6: /note="G in position 6 is a 2'-fluoro-guanosine (fG)"
  variation 7: /note="A in position 7 is a lA4b analog"
  variation 8: /note="G in position 8 is a 2'-fluoro-guanosine (fG)"
  variation 9: /note="C in position 9 is a 2'-O-Methylcytidine (mC)"
  variation 10: /note="A in position 10 is a 2'-fluoro-adenosine (fA)"
  variation 11: /note="A in position 11 is a 2'-O-Methyladenosine (mA)"
  variation 12: /note="G in position 12 is a 2'-O-Methylguanosine (mG)"
  variation 13: /note="A in position 13 is a 2'-O-Methyladenosine (mA)"
  variation 14: /note="A in position 14 is a lA4b analog"
  variation 15: /note="C in position 15 is a 2'-O-Methylcytidine (mC)"
  variation 16: /note="A in position 16 is a 2'-fluoro-adenosine (fA)"
  variation 17: /note="C in position 17 is a 2'-O-Methylcytidine (mC)"
  variation 18: /note="U in position 18 is a 2'- fluoro-uridine (fU)"
  variation 19: /note="G in position 19 is a 2'-O-Methylguanosine (mG)"
  variation 20: /note="U in position 20 is a 2'- fluoro-uridine (fU)"
  variation 21: /note="U in position 21 is a 2'-O-Methyluridine (mU)"
  variation 21: /note="the nucleotide in position 21 and the nucleotide in position 22 are linked through a phosphorothiate linkage "
  variation 22: /note="U in position 22 is a 2'-O-Methyluridine (mU)"
  variation 22: /note="the nucleotide in position 22 and the nucleotide in position 21 are linked through a phosphorothiate linkage "
  variation 22: /note="the nucleotide in position 22 and the nucleotide in position 23 are linked through a phosphorothiate linkage "
  variation 23: /note="U in position 23 is a 2'-O-Methyluridine (mU)"
  variation 23: /note="the nucleotide in position 23 and the nucleotide in position 22 are linked through a phosphorothiate linkage "
uuauagagcaagaacacuguuuu

SEQ ID NO: 103 - RNA, 23 nt, Artificial Sequence
  3-35
  variation 1: /note="U in position 1 is a 2'-O-Methyluridine (mU)"
  variation 1: /note="the nucleotide in position 1 and the nucleotide in position 2 are linked through a phosphorothiate linkage "
  variation 2: /note="U in position 2 is a 2'- fluoro-uridine (fU)"
  variation 2: /note="the nucleotide in position 2 and the nucleotide in position 1 are linked through a phosphorothiate "
  variation 2: /note="the nucleotide in position 2 and the nucleotide in position 3 are linked through a phosphorothiate "
  variation 3: /note="A in position 3 is a 2'-O-Methyladenosine (mA)"
  variation 3: /note="the nucleotide in position 3 and the nucleotide in position 2 are linked through a phosphorothiate linkage "
  variation 4: /note="U in position 4 is a 2'- fluoro-uridine (fU)"
  variation 5: /note="A in position 5 is a 2'-O-Methyladenosine (mA)"
  variation 6: /note="G in position 6 is a 2'-fluoro-guanosine (fG)"
  variation 7: /note="A in position 7 is a lA4b analog"
  variation 8: /note="G in position 8 is a 2'-fluoro-guanosine (fG)"
  variation 9: /note="C in position 9 is a 2'-O-Methylcytidine (mC)"
  variation 10: /note="A in position 10 is a 2'-fluoro-adenosine (fA)"
  variation 11: /note="A in position 11 is a 2'-O-Methyladenosine (mA)"
  variation 12: /note="G in position 12 is a 2'-O-Methylguanosine (mG)"
  variation 13: /note="A in position 13 is a 2'-O-Methyladenosine (mA)"
  variation 14: /note="A in position 14 is a 2'-fluoro-adenosine (fA)"
  variation 15: /note="C in position 15 is a lC4b analog"
  variation 16: /note="A in position 16 is a 2'-fluoro-adenosine (fA)"
  variation 17: /note="C in position 17 is a 2'-O-Methylcytidine (mC)"
  variation 18: /note="U in position 18 is a 2'- fluoro-uridine (fU)"
  variation 19: /note="G in position 19 is a 2'-O-Methylguanosine (mG)"
  variation 20: /note="U in position 20 is a 2'- fluoro-uridine (fU)"
  variation 21: /note="U in position 21 is a 2'-O-Methyluridine (mU)"
  variation 21: /note="the nucleotide in position 21 and the nucleotide in position 22 are linked through a phosphorothiate linkage "
  variation 22: /note="U in position 22 is a 2'-O-Methyluridine (mU)"
  variation 22: /note="the nucleotide in position 22 and the nucleotide in position 21 are linked through a phosphorothiate linkage "
  variation 22: /note="the nucleotide in position 22 and the nucleotide in position 23 are linked through a phosphorothiate linkage "
  variation 23: /note="U in position 23 is a 2'-O-Methyluridine (mU)"
  variation 23: /note="the nucleotide in position 23 and the nucleotide in position 22 are linked through a phosphorothiate linkage "
uuauagagcaagaacacuguuuu

SEQ ID NO: 104 - RNA, 23 nt, Artificial Sequence
  as3-36
  variation 1: /note="U in position 1 is a 2'-O-Methyluridine (mU)"
  variation 1: /note="the nucleotide in position 1 and the nucleotide in position 2 are linked through a phosphorothiate linkage "
  variation 2: /note="U in position 2 is a 2'- fluoro-uridine (fU)"
  variation 2: /note="the nucleotide in position 2 and the nucleotide in position 1 are linked through a phosphorothiate "
  variation 2: /note="the nucleotide in position 2 and the nucleotide in position 3 are linked through a phosphorothiate "
  variation 3: /note="A in position 3 is a 2'-O-Methyladenosine (mA)"
  variation 3: /note="the nucleotide in position 3 and the nucleotide in position 2 are linked through a phosphorothiate linkage "
  variation 4: /note="U in position 4 is a 2'- fluoro-uridine (fU)"
  variation 5: /note="A in position 5 is a 2'-O-Methyladenosine (mA)"
  variation 6: /note="G in position 6 is a 2'-fluoro-guanosine (fG)"
  variation 7: /note="A in position 7 is a lA4b analog"
  variation 8: /note="G in position 8 is a 2'-fluoro-guanosine (fG)"
  variation 9: /note="C in position 9 is a 2'-O-Methylcytidine (mC)"
  variation 10: /note="A in position 10 is a 2'-fluoro-adenosine (fA)"
  variation 11: /note="A in position 11 is a 2'-O-Methyladenosine (mA)"
  variation 12: /note="G in position 12 is a 2'-O-Methylguanosine (mG)"
  variation 13: /note="A in position 13 is a 2'-O-Methyladenosine (mA)"
  variation 14: /note="A in position 14 is a 2'-fluoro-adenosine (fA)"
  variation 15: /note="C in position 15 is a 2'-O-Methylcytidine (mC)"
  variation 16: /note="A in position 16 is a lA4b analog"
  variation 17: /note="C in position 17 is a 2'-O-Methylcytidine (mC)"
  variation 18: /note="U in position 18 is a 2'- fluoro-uridine (fU)"
  variation 19: /note="G in position 19 is a 2'-O-Methylguanosine (mG)"
  variation 20: /note="U in position 20 is a 2'- fluoro-uridine (fU)"
  variation 21: /note="U in position 21 is a 2'-O-Methyluridine (mU)"
  variation 21: /note="the nucleotide in position 21 and the nucleotide in position 22 are linked through a phosphorothiate linkage "
  variation 22: /note="U in position 22 is a 2'-O-Methyluridine (mU)"
  variation 22: /note="the nucleotide in position 22 and the nucleotide in position 21 are linked through a phosphorothiate linkage "
  variation 22: /note="the nucleotide in position 22 and the nucleotide in position 23 are linked through a phosphorothiate linkage "
  variation 23: /note="U in position 23 is a 2'-O-Methyluridine (mU)"
  variation 23: /note="the nucleotide in position 23 and the nucleotide in position 22 are linked through a phosphorothiate linkage "
uuauagagcaagaacacuguuuu

SEQ ID NO: 105 - RNA, 23 nt, Artificial Sequence
  as3-37
  variation 1: /note="U in position 1 is a 2'-O-Methyluridine (mU)"
  variation 1: /note="the nucleotide in position 1 and the nucleotide in position 2 are linked through a phosphorothiate linkage "
  variation 2: /note="U in position 2 is a 2'- fluoro-uridine (fU)"
  variation 2: /note="the nucleotide in position 2 and the nucleotide in position 1 are linked through a phosphorothiate "
  variation 2: /note="the nucleotide in position 2 and the nucleotide in position 3 are linked through a phosphorothiate "
  variation 3: /note="A in position 3 is a 2'-O-Methyladenosine (mA)"
  variation 3: /note="the nucleotide in position 3 and the nucleotide in position 2 are linked through a phosphorothiate linkage "
  variation 4: /note="U in position 4 is a 2'- fluoro-uridine (fU)"
  variation 5: /note="A in position 5 is a 2'-O-Methyladenosine (mA)"
  variation 6: /note="G in position 6 is a 2'-fluoro-guanosine (fG)"
  variation 7: /note="A in position 7 is a lA4b analog"
  variation 8: /note="G in position 8 is a 2'-fluoro-guanosine (fG)"
  variation 9: /note="C in position 9 is a 2'-O-Methylcytidine (mC)"
  variation 10: /note="A in position 10 is a 2'-fluoro-adenosine (fA)"
  variation 11: /note="A in position 11 is a 2'-O-Methyladenosine (mA)"
  variation 12: /note="G in position 12 is a 2'-O-Methylguanosine (mG)"
  variation 13: /note="A in position 13 is a 2'-O-Methyladenosine (mA)"
  variation 14: /note="A in position 14 is a 2'-fluoro-adenosine (fA)"
  variation 15: /note="C in position 15 is a 2'-O-Methylcytidine (mC)"
  variation 16: /note="A in position 16 is a 2'-fluoro-adenosine (fA)"
  variation 17: /note="C in position 17 is a lC4b analog"
  variation 18: /note="U in position 18 is a 2'- fluoro-uridine (fU)"
  variation 19: /note="G in position 19 is a 2'-O-Methylguanosine (mG)"
  variation 20: /note="U in position 20 is a 2'- fluoro-uridine (fU)"
  variation 21: /note="U in position 21 is a 2'-O-Methyluridine (mU)"
  variation 21: /note="the nucleotide in position 21 and the nucleotide in position 22 are linked through a phosphorothiate linkage "
  variation 22: /note="U in position 22 is a 2'-O-Methyluridine (mU)"
  variation 22: /note="the nucleotide in position 22 and the nucleotide in position 21 are linked through a phosphorothiate linkage "
  variation 22: /note="the nucleotide in position 22 and the nucleotide in position 23 are linked through a phosphorothiate linkage "
  variation 23: /note="U in position 23 is a 2'-O-Methyluridine (mU)"
  variation 23: /note="the nucleotide in position 23 and the nucleotide in position 22 are linked through a phosphorothiate linkage "
uuauagagcaagaacacuguuuu

SEQ ID NO: 106 - RNA, 23 nt, Artificial Sequence
  as3-38
  variation 1: /note="U in position 1 is a 2'-O-Methyluridine (mU)"
  variation 1: /note="the nucleotide in position 1 and the nucleotide in position 2 are linked through a phosphorothiate linkage "
  variation 2: /note="U in position 2 is a 2'- fluoro-uridine (fU)"
  variation 2: /note="the nucleotide in position 2 and the nucleotide in position 1 are linked through a phosphorothiate "
  variation 2: /note="the nucleotide in position 2 and the nucleotide in position 3 are linked through a phosphorothiate "
  variation 3: /note="A in position 3 is a 2'-O-Methyladenosine (mA)"
  variation 3: /note="the nucleotide in position 3 and the nucleotide in position 2 are linked through a phosphorothiate linkage "
  variation 4: /note="U in position 4 is a 2'- fluoro-uridine (fU)"
  variation 5: /note="A in position 5 is a 2'-O-Methyladenosine (mA)"
  variation 6: /note="G in position 6 is a 2'-fluoro-guanosine (fG)"
  variation 7: /note="A in position 7 is a lA4b analog"
  variation 8: /note="G in position 8 is a 2'-fluoro-guanosine (fG)"
  variation 9: /note="C in position 9 is a 2'-O-Methylcytidine (mC)"
  variation 10: /note="A in position 10 is a 2'-fluoro-adenosine (fA)"
  variation 11: /note="A in position 11 is a 2'-O-Methyladenosine (mA)"
  variation 12: /note="G in position 12 is a 2'-O-Methylguanosine (mG)"
  variation 13: /note="A in position 13 is a 2'-O-Methyladenosine (mA)"
  variation 14: /note="A in position 14 is a 2'-fluoro-adenosine (fA)"
  variation 15: /note="C in position 15 is a 2'-O-Methylcytidine (mC)"
  variation 16: /note="A in position 16 is a 2'-fluoro-adenosine (fA)"
  variation 17: /note="C in position 17 is a 2'-O-Methylcytidine (mC)"
  variation 18: /note="U in position 18 is a lU4b analog"
  variation 19: /note="G in position 19 is a 2'-O-Methylguanosine (mG)"
  variation 20: /note="U in position 20 is a 2'- fluoro-uridine (fU)"
  variation 21: /note="U in position 21 is a 2'-O-Methyluridine (mU)"
  variation 21: /note="the nucleotide in position 21 and the nucleotide in position 22 are linked through a phosphorothiate linkage "
  variation 22: /note="U in position 22 is a 2'-O-Methyluridine (mU)"
  variation 22: /note="the nucleotide in position 22 and the nucleotide in position 21 are linked through a phosphorothiate linkage "
  variation 22: /note="the nucleotide in position 22 and the nucleotide in position 23 are linked through a phosphorothiate linkage "
  variation 23: /note="U in position 23 is a 2'-O-Methyluridine (mU)"
  variation 23: /note="the nucleotide in position 23 and the nucleotide in position 22 are linked through a phosphorothiate linkage "
uuauagagcaagaacacuguuuu

SEQ ID NO: 107 - RNA, 23 nt, Artificial Sequence
  as3-39
  variation 1: /note="U in position 1 is a 2'-O-Methyluridine (mU)"
  variation 1: /note="the nucleotide in position 1 and the nucleotide in position 2 are linked through a phosphorothiate linkage "
  variation 2: /note="U in position 2 is a 2'- fluoro-uridine (fU)"
  variation 2: /note="the nucleotide in position 2 and the nucleotide in position 1 are linked through a phosphorothiate "
  variation 2: /note="the nucleotide in position 2 and the nucleotide in position 3 are linked through a phosphorothiate "
  variation 3: /note="A in position 3 is a 2'-O-Methyladenosine (mA)"
  variation 3: /note="the nucleotide in position 3 and the nucleotide in position 2 are linked through a phosphorothiate linkage "
  variation 4: /note="U in position 4 is a 2'- fluoro-uridine (fU)"
  variation 5: /note="A in position 5 is a 2'-O-Methyladenosine (mA)"
  variation 6: /note="G in position 6 is a 2'-fluoro-guanosine (fG)"
  variation 7: /note="A in position 7 is a lA4b analog"
  variation 8: /note="G in position 8 is a 2'-fluoro-guanosine (fG)"
  variation 9: /note="C in position 9 is a 2'-O-Methylcytidine (mC)"
  variation 10: /note="A in position 10 is a 2'-fluoro-adenosine (fA)"
  variation 11: /note="A in position 11 is a 2'-O-Methyladenosine (mA)"
  variation 12: /note="G in position 12 is a 2'-O-Methylguanosine (mG)"
  variation 13: /note="A in position 13 is a 2'-O-Methyladenosine (mA)"
  variation 14: /note="A in position 14 is a 2'-fluoro-adenosine (fA)"
  variation 15: /note="C in position 15 is a 2'-O-Methylcytidine (mC)"
  variation 16: /note="A in position 16 is a 2'-fluoro-adenosine (fA)"
  variation 17: /note="C in position 17 is a 2'-O-Methylcytidine (mC)"
  variation 18: /note="U in position 18 is a 2'- fluoro-uridine (fU)"
  variation 19: /note="G in position 19 is a lG4b analog"
  variation 20: /note="U in position 20 is a 2'- fluoro-uridine (fU)"
  variation 21: /note="U in position 21 is a 2'-O-Methyluridine (mU)"
  variation 21: /note="the nucleotide in position 21 and the nucleotide in position 22 are linked through a phosphorothiate linkage "
  variation 22: /note="U in position 22 is a 2'-O-Methyluridine (mU)"
  variation 22: /note="the nucleotide in position 22 and the nucleotide in position 21 are linked through a phosphorothiate linkage "
  variation 22: /note="the nucleotide in position 22 and the nucleotide in position 23 are linked through a phosphorothiate linkage "
  variation 23: /note="U in position 23 is a 2'-O-Methyluridine (mU)"
  variation 23: /note="the nucleotide in position 23 and the nucleotide in position 22 are linked through a phosphorothiate linkage "
uuauagagcaagaacacuguuuu

SEQ ID NO: 108 - RNA, 23 nt, Artificial Sequence
  as3-40
  variation 1: /note="U in position 1 is a 2'-O-Methyluridine (mU)"
  variation 1: /note="the nucleotide in position 1 and the nucleotide in position 2 are linked through a phosphorothiate linkage "
  variation 2: /note="U in position 2 is a 2'- fluoro-uridine (fU)"
  variation 2: /note="the nucleotide in position 2 and the nucleotide in position 1 are linked through a phosphorothiate "
  variation 2: /note="the nucleotide in position 2 and the nucleotide in position 3 are linked through a phosphorothiate "
  variation 3: /note="A in position 3 is a 2'-O-Methyladenosine (mA)"
  variation 3: /note="the nucleotide in position 3 and the nucleotide in position 2 are linked through a phosphorothiate linkage "
  variation 4: /note="U in position 4 is a 2'- fluoro-uridine (fU)"
  variation 5: /note="A in position 5 is a 2'-O-Methyladenosine (mA)"
  variation 6: /note="G in position 6 is a 2'-fluoro-guanosine (fG)"
  variation 7: /note="A in position 7 is a lA4b analog"
  variation 8: /note="G in position 8 is a 2'-fluoro-guanosine (fG)"
  variation 9: /note="C in position 9 is a 2'-O-Methylcytidine (mC)"
  variation 10: /note="A in position 10 is a 2'-fluoro-adenosine (fA)"
  variation 11: /note="A in position 11 is a 2'-O-Methyladenosine (mA)"
  variation 12: /note="G in position 12 is a 2'-O-Methylguanosine (mG)"
  variation 13: /note="A in position 13 is a 2'-O-Methyladenosine (mA)"
  variation 14: /note="A in position 14 is a 2'-fluoro-adenosine (fA)"
  variation 15: /note="C in position 15 is a 2'-O-Methylcytidine (mC)"
  variation 16: /note="A in position 16 is a 2'-fluoro-adenosine (fA)"
  variation 17: /note="C in position 17 is a 2'-O-Methylcytidine (mC)"
  variation 18: /note="U in position 18 is a 2'- fluoro-uridine (fU)"
  variation 19: /note="G in position 19 is a 2'-O-Methylguanosine (mG)"
  variation 20: /note="U in position 20 is a lU4b analog"
  variation 21: /note="U in position 21 is a 2'-O-Methyluridine (mU)"
  variation 21: /note="the nucleotide in position 21 and the nucleotide in position 22 are linked through a phosphorothiate linkage "
  variation 22: /note="U in position 22 is a 2'-O-Methyluridine (mU)"
  variation 22: /note="the nucleotide in position 22 and the nucleotide in position 21 are linked through a phosphorothiate linkage "
  variation 22: /note="the nucleotide in position 22 and the nucleotide in position 23 are linked through a phosphorothiate linkage "
  variation 23: /note="U in position 23 is a 2'-O-Methyluridine (mU)"
  variation 23: /note="the nucleotide in position 23 and the nucleotide in position 22 are linked through a phosphorothiate linkage "
uuauagagcaagaacacuguuuu

SEQ ID NO: 109 - RNA, 23 nt, Artificial Sequence
  as3-41
  variation 1: /note="U in position 1 is a 2'-O-Methyluridine (mU)"
  variation 1: /note="the nucleotide in position 1 and the nucleotide in position 2 are linked through a phosphorothiate linkage "
  variation 2: /note="U in position 2 is a 2'- fluoro-uridine (fU)"
  variation 2: /note="the nucleotide in position 2 and the nucleotide in position 1 are linked through a phosphorothiate "
  variation 2: /note="the nucleotide in position 2 and the nucleotide in position 3 are linked through a phosphorothiate "
  variation 3: /note="A in position 3 is a 2'-O-Methyladenosine (mA)"
  variation 3: /note="the nucleotide in position 3 and the nucleotide in position 2 are linked through a phosphorothiate linkage "
  variation 4: /note="U in position 4 is a 2'- fluoro-uridine (fU)"
  variation 5: /note="A in position 5 is a 2'-O-Methyladenosine (mA)"
  variation 6: /note="G in position 6 is a 2'-fluoro-guanosine (fG)"
  variation 7: /note="A in position 7 is a lA4b analog"
  variation 8: /note="G in position 8 is a 2'-fluoro-guanosine (fG)"
  variation 9: /note="C in position 9 is a 2'-O-Methylcytidine (mC)"
  variation 10: /note="A in position 10 is a 2'-fluoro-adenosine (fA)"
  variation 11: /note="A in position 11 is a 2'-O-Methyladenosine (mA)"
  variation 12: /note="G in position 12 is a 2'-O-Methylguanosine (mG)"
  variation 13: /note="A in position 13 is a 2'-O-Methyladenosine (mA)"
  variation 14: /note="A in position 14 is a 2'-fluoro-adenosine (fA)"
  variation 15: /note="C in position 15 is a 2'-O-Methylcytidine (mC)"
  variation 16: /note="A in position 16 is a 2'-fluoro-adenosine (fA)"
  variation 17: /note="C in position 17 is a 2'-O-Methylcytidine (mC)"
  variation 18: /note="U in position 18 is a 2'- fluoro-uridine (fU)"
  variation 19: /note="G in position 19 is a 2'-O-Methylguanosine (mG)"
  variation 20: /note="U in position 20 is a 2'- fluoro-uridine (fU)"
  variation 21: /note="U in position 21 is a lU4b analog"
  variation 21: /note="the nucleotide in position 21 and the nucleotide in position 22 are linked through a phosphorothiate linkage "
  variation 22: /note="U in position 22 is a 2'-O-Methyluridine (mU)"
  variation 22: /note="the nucleotide in position 22 and the nucleotide in position 21 are linked through a phosphorothiate linkage "
  variation 22: /note="the nucleotide in position 22 and the nucleotide in position 23 are linked through a phosphorothiate linkage "
  variation 23: /note="U in position 23 is a 2'-O-Methyluridine (mU)"
  variation 23: /note="the nucleotide in position 23 and the nucleotide in position 22 are linked through a phosphorothiate linkage "
uuauagagcaagaacacuguuuu

SEQ ID NO: 110 - RNA, 23 nt, Artificial Sequence
  as3-42
  variation 1: /note="U in position 1 is a lU1b analog"
  variation 1: /note="the nucleotide in position 1 and the nucleotide in position 2 are linked through a phosphorothiate linkage "
  variation 2: /note="U in position 2 is a 2'- fluoro-uridine (fU)"
  variation 2: /note="the nucleotide in position 2 and the nucleotide in position 1 are linked through a phosphorothiate "
  variation 2: /note="the nucleotide in position 2 and the nucleotide in position 3 are linked through a phosphorothiate "
  variation 3: /note="A in position 3 is a 2'-O-Methyladenosine (mA)"
  variation 3: /note="the nucleotide in position 3 and the nucleotide in position 2 are linked through a phosphorothiate linkage "
  variation 4: /note="U in position 4 is a 2'- fluoro-uridine (fU)"
  variation 5: /note="A in position 5 is a 2'-O-Methyladenosine (mA)"
  variation 6: /note="G in position 6 is a 2'-fluoro-guanosine (fG)"
  variation 7: /note="A in position 7 is a 2'-O-Methyladenosine (mA)"
  variation 8: /note="G in position 8 is a 2'-fluoro-guanosine (fG)"
  variation 9: /note="C in position 9 is a 2'-O-Methylcytidine (mC)"
  variation 10: /note="A in position 10 is a 2'-fluoro-adenosine (fA)"
  variation 11: /note="A in position 11 is a 2'-O-Methyladenosine (mA)"
  variation 12: /note="G in position 12 is a 2'-O-Methylguanosine (mG)"
  variation 13: /note="A in position 13 is a 2'-O-Methyladenosine (mA)"
  variation 14: /note="A in position 14 is a 2'-fluoro-adenosine (fA)"
  variation 15: /note="C in position 15 is a 2'-O-Methylcytidine (mC)"
  variation 16: /note="A in position 16 is a 2'-fluoro-adenosine (fA)"
  variation 17: /note="C in position 17 is a 2'-O-Methylcytidine (mC)"
  variation 18: /note="U in position 18 is a 2'- fluoro-uridine (fU)"
  variation 19: /note="G in position 19 is a 2'-O-Methylguanosine (mG)"
  variation 20: /note="U in position 20 is a 2'- fluoro-uridine (fU)"
  variation 21: /note="U in position 21 is a 2'-O-Methyluridine (mU)"
  variation 21: /note="the nucleotide in position 21 and the nucleotide in position 22 are linked through a phosphorothiate linkage "
  variation 22: /note="U in position 22 is a 2'-O-Methyluridine (mU)"
  variation 22: /note="the nucleotide in position 22 and the nucleotide in position 21 are linked through a phosphorothiate linkage "
  variation 22: /note="the nucleotide in position 22 and the nucleotide in position 23 are linked through a phosphorothiate linkage "
  variation 23: /note="U in position 23 is a 2'-O-Methyluridine (mU)"
  variation 23: /note="the nucleotide in position 23 and the nucleotide in position 22 are linked through a phosphorothiate linkage "
uuauagagcaagaacacuguuuu

SEQ ID NO: 111 - RNA, 23 nt, Artificial Sequence
  as3-43
  variation 1: /note="U in position 1 is a 2'-O-Methyluridine (mU)"
  variation 1: /note="the nucleotide in position 1 and the nucleotide in position 2 are linked through a phosphorothiate linkage "
  variation 2: /note="U in position 2 is a lU1b analog"
  variation 2: /note="the nucleotide in position 2 and the nucleotide in position 1 are linked through a phosphorothiate "
  variation 2: /note="the nucleotide in position 2 and the nucleotide in position 3 are linked through a phosphorothiate "
  variation 3: /note="A in position 3 is a 2'-O-Methyladenosine (mA)"
  variation 3: /note="the nucleotide in position 3 and the nucleotide in position 2 are linked through a phosphorothiate linkage "
  variation 4: /note="U in position 4 is a 2'- fluoro-uridine (fU)"
  variation 5: /note="A in position 5 is a 2'-O-Methyladenosine (mA)"
  variation 6: /note="G in position 6 is a 2'-fluoro-guanosine (fG)"
  variation 7: /note="A in position 7 is a 2'-O-Methyladenosine (mA)"
  variation 8: /note="G in position 8 is a 2'-fluoro-guanosine (fG)"
  variation 9: /note="C in position 9 is a 2'-O-Methylcytidine (mC)"
  variation 10: /note="A in position 10 is a 2'-fluoro-adenosine (fA)"
  variation 11: /note="A in position 11 is a 2'-O-Methyladenosine (mA)"
  variation 12: /note="G in position 12 is a 2'-O-Methylguanosine (mG)"
  variation 13: /note="A in position 13 is a 2'-O-Methyladenosine (mA)"
  variation 14: /note="A in position 14 is a 2'-fluoro-adenosine (fA)"
  variation 15: /note="C in position 15 is a 2'-O-Methylcytidine (mC)"
  variation 16: /note="A in position 16 is a 2'-fluoro-adenosine (fA)"
  variation 17: /note="C in position 17 is a 2'-O-Methylcytidine (mC)"
  variation 18: /note="U in position 18 is a 2'- fluoro-uridine (fU)"
  variation 19: /note="G in position 19 is a 2'-O-Methylguanosine (mG)"
  variation 20: /note="U in position 20 is a 2'- fluoro-uridine (fU)"
  variation 21: /note="U in position 21 is a 2'-O-Methyluridine (mU)"
  variation 21: /note="the nucleotide in position 21 and the nucleotide in position 22 are linked through a phosphorothiate linkage "
  variation 22: /note="U in position 22 is a 2'-O-Methyluridine (mU)"
  variation 22: /note="the nucleotide in position 22 and the nucleotide in position 21 are linked through a phosphorothiate linkage "
  variation 22: /note="the nucleotide in position 22 and the nucleotide in position 23 are linked through a phosphorothiate linkage "
  variation 23: /note="U in position 23 is a 2'-O-Methyluridine (mU)"
  variation 23: /note="the nucleotide in position 23 and the nucleotide in position 22 are linked through a phosphorothiate linkage "
uuauagagcaagaacacuguuuu

SEQ ID NO: 112 - RNA, 23 nt, Artificial Sequence
  as3-44
  variation 1: /note="U in position 1 is a 2'-O-Methyluridine (mU)"
  variation 1: /note="the nucleotide in position 1 and the nucleotide in position 2 are linked through a phosphorothiate linkage "
  variation 2: /note="U in position 2 is a 2'- fluoro-uridine (fU)"
  variation 2: /note="the nucleotide in position 2 and the nucleotide in position 1 are linked through a phosphorothiate "
  variation 2: /note="the nucleotide in position 2 and the nucleotide in position 3 are linked through a phosphorothiate "
  variation 3: /note="A in position 3 is a lA1b analog"
  variation 3: /note="the nucleotide in position 3 and the nucleotide in position 2 are linked through a phosphorothiate linkage "
  variation 4: /note="U in position 4 is a 2'- fluoro-uridine (fU)"
  variation 5: /note="A in position 5 is a 2'-O-Methyladenosine (mA)"
  variation 6: /note="G in position 6 is a 2'-fluoro-guanosine (fG)"
  variation 7: /note="A in position 7 is a 2'-O-Methyladenosine (mA)"
  variation 8: /note="G in position 8 is a 2'-fluoro-guanosine (fG)"
  variation 9: /note="C in position 9 is a 2'-O-Methylcytidine (mC)"
  variation 10: /note="A in position 10 is a 2'-fluoro-adenosine (fA)"
  variation 11: /note="A in position 11 is a 2'-O-Methyladenosine (mA)"
  variation 12: /note="G in position 12 is a 2'-O-Methylguanosine (mG)"
  variation 13: /note="A in position 13 is a 2'-O-Methyladenosine (mA)"
  variation 14: /note="A in position 14 is a 2'-fluoro-adenosine (fA)"
  variation 15: /note="C in position 15 is a 2'-O-Methylcytidine (mC)"
  variation 16: /note="A in position 16 is a 2'-fluoro-adenosine (fA)"
  variation 17: /note="C in position 17 is a 2'-O-Methylcytidine (mC)"
  variation 18: /note="U in position 18 is a 2'- fluoro-uridine (fU)"
  variation 19: /note="G in position 19 is a 2'-O-Methylguanosine (mG)"
  variation 20: /note="U in position 20 is a 2'- fluoro-uridine (fU)"
  variation 21: /note="U in position 21 is a 2'-O-Methyluridine (mU)"
  variation 21: /note="the nucleotide in position 21 and the nucleotide in position 22 are linked through a phosphorothiate linkage "
  variation 22: /note="U in position 22 is a 2'-O-Methyluridine (mU)"
  variation 22: /note="the nucleotide in position 22 and the nucleotide in position 21 are linked through a phosphorothiate linkage "
  variation 22: /note="the nucleotide in position 22 and the nucleotide in position 23 are linked through a phosphorothiate linkage "
  variation 23: /note="U in position 23 is a 2'-O-Methyluridine (mU)"
  variation 23: /note="the nucleotide in position 23 and the nucleotide in position 22 are linked through a phosphorothiate linkage "
uuauagagcaagaacacuguuuu

SEQ ID NO: 113 - RNA, 23 nt, Artificial Sequence
  as3-45
  variation 1: /note="U in position 1 is a 2'-O-Methyluridine (mU)"
  variation 1: /note="the nucleotide in position 1 and the nucleotide in position 2 are linked through a phosphorothiate linkage "
  variation 2: /note="U in position 2 is a 2'- fluoro-uridine (fU)"
  variation 2: /note="the nucleotide in position 2 and the nucleotide in position 1 are linked through a phosphorothiate "
  variation 2: /note="the nucleotide in position 2 and the nucleotide in position 3 are linked through a phosphorothiate "
  variation 3: /note="A in position 3 is a 2'-O-Methyladenosine (mA)"
  variation 3: /note="the nucleotide in position 3 and the nucleotide in position 2 are linked through a phosphorothiate linkage "
  variation 4: /note="U in position 4 is a lU1b analog"
  variation 5: /note="A in position 5 is a 2'-O-Methyladenosine (mA)"
  variation 6: /note="G in position 6 is a 2'-fluoro-guanosine (fG)"
  variation 7: /note="A in position 7 is a 2'-O-Methyladenosine (mA)"
  variation 8: /note="G in position 8 is a 2'-fluoro-guanosine (fG)"
  variation 9: /note="C in position 9 is a 2'-O-Methylcytidine (mC)"
  variation 10: /note="A in position 10 is a 2'-fluoro-adenosine (fA)"
  variation 11: /note="A in position 11 is a 2'-O-Methyladenosine (mA)"
  variation 12: /note="G in position 12 is a 2'-O-Methylguanosine (mG)"
  variation 13: /note="A in position 13 is a 2'-O-Methyladenosine (mA)"
  variation 14: /note="A in position 14 is a 2'-fluoro-adenosine (fA)"
  variation 15: /note=" in position 15 is a 2'-O-Methylcytidine (mC)"
  variation 16: /note="A in position 16 is a 2'-fluoro-adenosine (fA)"
  variation 17: /note="C in position 17 is a 2'-O-Methylcytidine (mC)"
  variation 18: /note="U in position 18 is a 2'- fluoro-uridine (fU)"
  variation 19: /note="G in position 19 is a 2'-O-Methylguanosine (mG)"
  variation 20: /note="U in position 20 is a 2'- fluoro-uridine (fU)"
  variation 21: /note="U in position 21 is a 2'-O-Methyluridine (mU)"
  variation 21: /note="the nucleotide in position 21 and the nucleotide in position 22 are linked through a phosphorothiate linkage "
  variation 22: /note="U in position 22 is a 2'-O-Methyluridine (mU)"
  variation 22: /note="the nucleotide in position 22 and the nucleotide in position 21 are linked through a phosphorothiate linkage "
  variation 22: /note="the nucleotide in position 22 and the nucleotide in position 23 are linked through a phosphorothiate linkage "
  variation 23: /note="U in position 23 is a 2'-O-Methyluridine (mU)"
  variation 23: /note="the nucleotide in position 23 and the nucleotide in position 22 are linked through a phosphorothiate linkage "
uuauagagcaagaacacuguuuu

SEQ ID NO: 114 - RNA, 23 nt, Artificial Sequence
  as3-46
  variation 1: /note="U in position 1 is a 2'-O-Methyluridine (mU)"
  variation 1: /note="the nucleotide in position 1 and the nucleotide in position 2 are linked through a phosphorothiate linkage "
  variation 2: /note="U in position 2 is a 2'- fluoro-uridine (fU)"
  variation 2: /note="the nucleotide in position 2 and the nucleotide in position 1 are linked through a phosphorothiate "
  variation 2: /note="the nucleotide in position 2 and the nucleotide in position 3 are linked through a phosphorothiate "
  variation 3: /note="A in position 3 is a 2'-O-Methyladenosine (mA)"
  variation 3: /note="the nucleotide in position 3 and the nucleotide in position 2 are linked through a phosphorothiate linkage "
  variation 4: /note="U in position 4 is a 2'- fluoro-uridine (fU)"
  variation 5: /note="A in position 5 is a lA1b analog"
  variation 6: /note="G in position 6 is a 2'-fluoro-guanosine (fG)"
  variation 7: /note="A in position 7 is a 2'-O-Methyladenosine (mA)"
  variation 8: /note="G in position 8 is a 2'-fluoro-guanosine (fG)"
  variation 9: /note="C in position 9 is a 2'-O-Methylcytidine (mC)"
  variation 10: /note="A in position 10 is a 2'-fluoro-adenosine (fA)"
  variation 11: /note="A in position 11 is a 2'-O-Methyladenosine (mA)"
  variation 12: /note="G in position 12 is a 2'-O-Methylguanosine (mG)"
  variation 13: /note="A in position 13 is a 2'-O-Methyladenosine (mA)"
  variation 14: /note="A in position 14 is a 2'-fluoro-adenosine (fA)"
  variation 15: /note=" in position 15 is a 2'-O-Methylcytidine (mC)"
  variation 16: /note="A in position 16 is a 2'-fluoro-adenosine (fA)"
  variation 17: /note="C in position 17 is a 2'-O-Methylcytidine (mC)"
  variation 18: /note="U in position 18 is a 2'- fluoro-uridine (fU)"
  variation 19: /note="G in position 19 is a 2'-O-Methylguanosine (mG)"
  variation 20: /note="U in position 20 is a 2'- fluoro-uridine (fU)"
  variation 21: /note="U in position 21 is a 2'-O-Methyluridine (mU)"
  variation 21: /note="the nucleotide in position 21 and the nucleotide in position 22 are linked through a phosphorothiate linkage "
  variation 22: /note="U in position 22 is a 2'-O-Methyluridine (mU)"
  variation 22: /note="the nucleotide in position 22 and the nucleotide in position 21 are linked through a phosphorothiate linkage "
  variation 22: /note="the nucleotide in position 22 and the nucleotide in position 23 are linked through a phosphorothiate linkage "
  variation 23: /note="U in position 23 is a 2'-O-Methyluridine (mU)"
  variation 23: /note="the nucleotide in position 23 and the nucleotide in position 22 are linked through a phosphorothiate linkage "
uuauagagcaagaacacuguuuu

SEQ ID NO: 115 - RNA, 23 nt, Artificial Sequence
  as3-47
  variation 1: /note="U in position 1 is a 2'-O-Methyluridine (mU)"
  variation 1: /note="the nucleotide in position 1 and the nucleotide in position 2 are linked through a phosphorothiate linkage "
  variation 2: /note="U in position 2 is a 2'- fluoro-uridine (fU)"
  variation 2: /note="the nucleotide in position 2 and the nucleotide in position 1 are linked through a phosphorothiate "
  variation 2: /note="the nucleotide in position 2 and the nucleotide in position 3 are linked through a phosphorothiate "
  variation 3: /note="A in position 3 is a 2'-O-Methyladenosine (mA)"
  variation 3: /note="the nucleotide in position 3 and the nucleotide in position 2 are linked through a phosphorothiate linkage "
  variation 4: /note="U in position 4 is a 2'- fluoro-uridine (fU)"
  variation 5: /note="A in position 5 is a 2'-O-Methyladenosine (mA)"
  variation 6: /note="G in position 6 is a lG1b analog"
  variation 7: /note="A in position 7 is a 2'-O-Methyladenosine (mA)"
  variation 8: /note="G in position 8 is a 2'-fluoro-guanosine (fG)"
  variation 9: /note="C in position 9 is a 2'-O-Methylcytidine (mC)"
  variation 10: /note="A in position 10 is a 2'-fluoro-adenosine (fA)"
  variation 11: /note="A in position 11 is a 2'-O-Methyladenosine (mA)"
  variation 12: /note="G in position 12 is a 2'-O-Methylguanosine (mG)"
  variation 13: /note="A in position 13 is a 2'-O-Methyladenosine (mA)"
  variation 14: /note="A in position 14 is a 2'-fluoro-adenosine (fA)"
  variation 15: /note=" in position 15 is a 2'-O-Methylcytidine (mC)"
  variation 16: /note="A in position 16 is a 2'-fluoro-adenosine (fA)"
  variation 17: /note="C in position 17 is a 2'-O-Methylcytidine (mC)"
  variation 18: /note="U in position 18 is a 2'- fluoro-uridine (fU)"
  variation 19: /note="G in position 19 is a 2'-O-Methylguanosine (mG)"
  variation 20: /note="U in position 20 is a 2'- fluoro-uridine (fU)"
  variation 21: /note="U in position 21 is a 2'-O-Methyluridine (mU)"
  variation 21: /note="the nucleotide in position 21 and the nucleotide in position 22 are linked through a phosphorothiate linkage "
  variation 22: /note="U in position 22 is a 2'-O-Methyluridine (mU)"
  variation 22: /note="the nucleotide in position 22 and the nucleotide in position 21 are linked through a phosphorothiate linkage "
  variation 22: /note="the nucleotide in position 22 and the nucleotide in position 23 are linked through a phosphorothiate linkage "
  variation 23: /note="U in position 23 is a 2'-O-Methyluridine (mU)"
  variation 23: /note="the nucleotide in position 23 and the nucleotide in position 22 are linked through a phosphorothiate linkage "
uuauagagcaagaacacuguuuu

SEQ ID NO: 116 - RNA, 23 nt, Artificial Sequence
  as3-48
  variation 1: /note="U in position 1 is a 2'-O-Methyluridine (mU)"
  variation 1: /note="the nucleotide in position 1 and the nucleotide in position 2 are linked through a phosphorothiate linkage "
  variation 2: /note="U in position 2 is a 2'- fluoro-uridine (fU)"
  variation 2: /note="the nucleotide in position 2 and the nucleotide in position 1 are linked through a phosphorothiate "
  variation 2: /note="the nucleotide in position 2 and the nucleotide in position 3 are linked through a phosphorothiate "
  variation 3: /note="A in position 3 is a 2'-O-Methyladenosine (mA)"
  variation 3: /note="the nucleotide in position 3 and the nucleotide in position 2 are linked through a phosphorothiate linkage "
  variation 4: /note="U in position 4 is a 2'- fluoro-uridine (fU)"
  variation 5: /note="A in position 5 is a 2'-O-Methyladenosine (mA)"
  variation 6: /note="G in position 6 is a 2'-fluoro-guanosine (fG)"
  variation 7: /note="A in position 7 is a lA1b analog"
  variation 8: /note="G in position 8 is a 2'-fluoro-guanosine (fG)"
  variation 9: /note="C in position 9 is a 2'-O-Methylcytidine (mC)"
  variation 10: /note="A in position 10 is a 2'-fluoro-adenosine (fA)"
  variation 11: /note="A in position 11 is a 2'-O-Methyladenosine (mA)"
  variation 12: /note="G in position 12 is a 2'-O-Methylguanosine (mG)"
  variation 13: /note="A in position 13 is a 2'-O-Methyladenosine (mA)"
  variation 14: /note="A in position 14 is a 2'-fluoro-adenosine (fA)"
  variation 15: /note="C in position 15 is a 2'-O-Methylcytidine (mC)"
  variation 16: /note="A in position 16 is a 2'-fluoro-adenosine (fA)"
  variation 17: /note="C in position 17 is a 2'-O-Methylcytidine (mC)"
  variation 18: /note="U in position 18 is a 2'- fluoro-uridine (fU)"
  variation 19: /note="G in position 19 is a 2'-O-Methylguanosine (mG)"
  variation 20: /note="U in position 20 is a 2'- fluoro-uridine (fU)"
  variation 21: /note="U in position 21 is a 2'-O-Methyluridine (mU)"
  variation 21: /note="the nucleotide in position 21 and the nucleotide in position 22 are linked through a phosphorothiate linkage "
  variation 22: /note="U in position 22 is a 2'-O-Methyluridine (mU)"
  variation 22: /note="the nucleotide in position 22 and the nucleotide in position 21 are linked through a phosphorothiate linkage "
  variation 22: /note="the nucleotide in position 22 and the nucleotide in position 23 are linked through a phosphorothiate linkage "
  variation 23: /note="U in position 23 is a 2'-O-Methyluridine (mU)"
  variation 23: /note="the nucleotide in position 23 and the nucleotide in position 22 are linked through a phosphorothiate linkage "
uuauagagcaagaacacuguuuu

SEQ ID NO: 117 - RNA, 23 nt, Artificial Sequence
  as3-49
  variation 1: /note="U in position 1 is a 2'-O-Methyluridine (mU)"
  variation 1: /note="the nucleotide in position 1 and the nucleotide in position 2 are linked through a phosphorothiate linkage "
  variation 2: /note="U in position 2 is a 2'- fluoro-uridine (fU)"
  variation 2: /note="the nucleotide in position 2 and the nucleotide in position 1 are linked through a phosphorothiate "
  variation 2: /note="the nucleotide in position 2 and the nucleotide in position 3 are linked through a phosphorothiate "
  variation 3: /note="A in position 3 is a 2'-O-Methyladenosine (mA)"
  variation 3: /note="the nucleotide in position 3 and the nucleotide in position 2 are linked through a phosphorothiate linkage "
  variation 4: /note="U in position 4 is a 2'- fluoro-uridine (fU)"
  variation 5: /note="A in position 5 is a 2'-O-Methyladenosine (mA)"
  variation 6: /note="G in position 6 is a 2'-fluoro-guanosine (fG)"
  variation 7: /note="A in position 7 is a 2'-O-Methyladenosine (mA)"
  variation 8: /note="G in position 8 is a lG1b analog"
  variation 9: /note="C in position 9 is a 2'-O-Methylcytidine (mC)"
  variation 10: /note="A in position 10 is a 2'-fluoro-adenosine (fA)"
  variation 11: /note="A in position 11 is a 2'-O-Methyladenosine (mA)"
  variation 12: /note="G in position 12 is a 2'-O-Methylguanosine (mG)"
  variation 13: /note="A in position 13 is a 2'-O-Methyladenosine (mA)"
  variation 14: /note="A in position 14 is a 2'-fluoro-adenosine (fA)"
  variation 15: /note="C in position 15 is a 2'-O-Methylcytidine (mC)"
  variation 16: /note="A in position 16 is a 2'-fluoro-adenosine (fA)"
  variation 17: /note="C in position 17 is a 2'-O-Methylcytidine (mC)"
  variation 18: /note="U in position 18 is a 2'- fluoro-uridine (fU)"
  variation 19: /note="G in position 19 is a 2'-O-Methylguanosine (mG)"
  variation 20: /note="U in position 20 is a 2'- fluoro-uridine (fU)"
  variation 21: /note="U in position 21 is a 2'-O-Methyluridine (mU)"
  variation 21: /note="the nucleotide in position 21 and the nucleotide in position 22 are linked through a phosphorothiate linkage "
  variation 22: /note="U in position 22 is a 2'-O-Methyluridine (mU)"
  variation 22: /note="the nucleotide in position 22 and the nucleotide in position 21 are linked through a phosphorothiate linkage "
  variation 22: /note="the nucleotide in position 22 and the nucleotide in position 23 are linked through a phosphorothiate linkage "
  variation 23: /note="U in position 23 is a 2'-O-Methyluridine (mU)"
  variation 23: /note="the nucleotide in position 23 and the nucleotide in position 22 are linked through a phosphorothiate linkage "
uuauagagcaagaacacuguuuu

SEQ ID NO: 118 - RNA, 23 nt, Artificial Sequence
  as3-50
  variation 1: /note="U in position 1 is a 2'-O-Methyluridine (mU)"
  variation 1: /note="the nucleotide in position 1 and the nucleotide in position 2 are linked through a phosphorothiate linkage "
  variation 2: /note="U in position 2 is a 2'- fluoro-uridine (fU)"
  variation 2: /note="the nucleotide in position 2 and the nucleotide in position 1 are linked through a phosphorothiate "
  variation 2: /note="the nucleotide in position 2 and the nucleotide in position 3 are linked through a phosphorothiate "
  variation 3: /note="A in position 3 is a 2'-O-Methyladenosine (mA)"
  variation 3: /note="the nucleotide in position 3 and the nucleotide in position 2 are linked through a phosphorothiate linkage "
  variation 4: /note="U in position 4 is a 2'- fluoro-uridine (fU)"
  variation 5: /note="A in position 5 is a 2'-O-Methyladenosine (mA)"
  variation 6: /note="G in position 6 is a 2'-fluoro-guanosine (fG)"
  variation 7: /note="A in position 7 is a 2'-O-Methyladenosine (mA)"
  variation 8: /note="G in position 8 is a 2'-fluoro-guanosine (fG)"
  variation 9: /note="C in position 9 is a lC1b analog"
  variation 10: /note="A in position 10 is a 2'-fluoro-adenosine (fA)"
  variation 11: /note="A in position 11 is a 2'-O-Methyladenosine (mA)"
  variation 12: /note="G in position 12 is a 2'-O-Methylguanosine (mG)"
  variation 13: /note="A in position 13 is a 2'-O-Methyladenosine (mA)"
  variation 14: /note="A in position 14 is a 2'-fluoro-adenosine (fA)"
  variation 15: /note="C in position 15 is a 2'-O-Methylcytidine (mC)"
  variation 16: /note="A in position 16 is a 2'-fluoro-adenosine (fA)"
  variation 17: /note="C in position 17 is a 2'-O-Methylcytidine (mC)"
  variation 18: /note="U in position 18 is a 2'- fluoro-uridine (fU)"
  variation 19: /note="G in position 19 is a 2'-O-Methylguanosine (mG)"
  variation 20: /note="U in position 20 is a 2'- fluoro-uridine (fU)"
  variation 21: /note="U in position 21 is a 2'-O-Methyluridine (mU)"
  variation 21: /note="the nucleotide in position 21 and the nucleotide in position 22 are linked through a phosphorothiate linkage "
  variation 22: /note="U in position 22 is a 2'-O-Methyluridine (mU)"
  variation 22: /note="the nucleotide in position 22 and the nucleotide in position 21 are linked through a phosphorothiate linkage "
  variation 22: /note="the nucleotide in position 22 and the nucleotide in position 23 are linked through a phosphorothiate linkage "
  variation 23: /note="U in position 23 is a 2'-O-Methyluridine (mU)"
  variation 23: /note="the nucleotide in position 23 and the nucleotide in position 22 are linked through a phosphorothiate linkage "
uuauagagcaagaacacuguuuu

SEQ ID NO: 119 - RNA, 23 nt, Artificial Sequence
  as3-51
  variation 1: /note="U in position 1 is a 2'-O-Methyluridine (mU)"
  variation 1: /note="the nucleotide in position 1 and the nucleotide in position 2 are linked through a phosphorothiate linkage "
  variation 2: /note="U in position 2 is a 2'- fluoro-uridine (fU)"
  variation 2: /note="the nucleotide in position 2 and the nucleotide in position 1 are linked through a phosphorothiate "
  variation 2: /note="the nucleotide in position 2 and the nucleotide in position 3 are linked through a phosphorothiate "
  variation 3: /note="A in position 3 is a 2'-O-Methyladenosine (mA)"
  variation 3: /note="the nucleotide in position 3 and the nucleotide in position 2 are linked through a phosphorothiate linkage "
  variation 4: /note="U in position 4 is a 2'- fluoro-uridine (fU)"
  variation 5: /note="A in position 5 is a 2'-O-Methyladenosine (mA)"
  variation 6: /note="G in position 6 is a 2'-fluoro-guanosine (fG)"
  variation 7: /note="A in position 7 is a 2'-O-Methyladenosine (mA)"
  variation 8: /note="G in position 8 is a 2'-fluoro-guanosine (fG)"
  variation 9: /note="C in position 9 is a 2'-O-Methylcytidine (mC)"
  variation 10: /note="A in position 10 is a lA1b analog"
  variation 11: /note="A in position 11 is a 2'-O-Methyladenosine (mA)"
  variation 12: /note="G in position 12 is a 2'-O-Methylguanosine (mG)"
  variation 13: /note="A in position 13 is a 2'-O-Methyladenosine (mA)"
  variation 14: /note="A in position 14 is a 2'-fluoro-adenosine (fA)"
  variation 15: /note="C in position 15 is a 2'-O-Methylcytidine (mC)"
  variation 16: /note="A in position 16 is a 2'-fluoro-adenosine (fA)"
  variation 17: /note="C in position 17 is a 2'-O-Methylcytidine (mC)"
  variation 18: /note="U in position 18 is a 2'- fluoro-uridine (fU)"
  variation 19: /note="G in position 19 is a 2'-O-Methylguanosine (mG)"
  variation 20: /note="U in position 20 is a 2'- fluoro-uridine (fU)"
  variation 21: /note="U in position 21 is a 2'-O-Methyluridine (mU)"
  variation 21: /note="the nucleotide in position 21 and the nucleotide in position 22 are linked through a phosphorothiate linkage "
  variation 22: /note="U in position 22 is a 2'-O-Methyluridine (mU)"
  variation 22: /note="the nucleotide in position 22 and the nucleotide in position 21 are linked through a phosphorothiate linkage "
  variation 22: /note="the nucleotide in position 22 and the nucleotide in position 23 are linked through a phosphorothiate linkage "
  variation 23: /note="U in position 23 is a 2'-O-Methyluridine (mU)"
  variation 23: /note="the nucleotide in position 23 and the nucleotide in position 22 are linked through a phosphorothiate linkage "
uuauagagcaagaacacuguuuu

SEQ ID NO: 120 - RNA, 23 nt, Artificial Sequence
  as3-52
  variation 1: /note="U in position 1 is a 2'-O-Methyluridine (mU)"
  variation 1: /note="the nucleotide in position 1 and the nucleotide in position 2 are linked through a phosphorothiate linkage "
  variation 2: /note="U in position 2 is a 2'- fluoro-uridine (fU)"
  variation 2: /note="the nucleotide in position 2 and the nucleotide in position 1 are linked through a phosphorothiate "
  variation 2: /note="the nucleotide in position 2 and the nucleotide in position 3 are linked through a phosphorothiate "
  variation 3: /note="A in position 3 is a 2'-O-Methyladenosine (mA)"
  variation 3: /note="the nucleotide in position 3 and the nucleotide in position 2 are linked through a phosphorothiate linkage "
  variation 4: /note="U in position 4 is a 2'- fluoro-uridine (fU)"
  variation 5: /note="A in position 5 is a 2'-O-Methyladenosine (mA)"
  variation 6: /note="G in position 6 is a 2'-fluoro-guanosine (fG)"
  variation 7: /note="A in position 7 is a 2'-O-Methyladenosine (mA)"
  variation 8: /note="G in position 8 is a 2'-fluoro-guanosine (fG)"
  variation 9: /note="C in position 9 is a 2'-O-Methylcytidine (mC)"
  variation 10: /note="A in position 10 is a 2'-fluoro-adenosine (fA)"
  variation 11: /note="A in position 11 is a lA1b analog"
  variation 12: /note="G in position 12 is a 2'-O-Methylguanosine (mG)"
  variation 13: /note="A in position 13 is a 2'-O-Methyladenosine (mA)"
  variation 14: /note="A in position 14 is a 2'-fluoro-adenosine (fA)"
  variation 15: /note="C in position 15 is a 2'-O-Methylcytidine (mC)"
  variation 16: /note="A in position 16 is a 2'-fluoro-adenosine (fA)"
  variation 17: /note="C in position 17 is a 2'-O-Methylcytidine (mC)"
  variation 18: /note="U in position 18 is a 2'- fluoro-uridine (fU)"
  variation 19: /note="G in position 19 is a 2'-O-Methylguanosine (mG)"
  variation 20: /note="U in position 20 is a 2'- fluoro-uridine (fU)"
  variation 21: /note="U in position 21 is a 2'-O-Methyluridine (mU)"
  variation 21: /note="the nucleotide in position 21 and the nucleotide in position 22 are linked through a phosphorothiate linkage "
  variation 22: /note="U in position 22 is a 2'-O-Methyluridine (mU)"
  variation 22: /note="the nucleotide in position 22 and the nucleotide in position 21 are linked through a phosphorothiate linkage "
  variation 22: /note="the nucleotide in position 22 and the nucleotide in position 23 are linked through a phosphorothiate linkage "
  variation 23: /note="U in position 23 is a 2'-O-Methyluridine (mU)"
  variation 23: /note="the nucleotide in position 23 and the nucleotide in position 22 are linked through a phosphorothiate linkage "
uuauagagcaagaacacuguuuu

SEQ ID NO: 121 - RNA, 23 nt, Artificial Sequence
  as3-53
  variation 1: /note="U in position 1 is a 2'-O-Methyluridine (mU)"
  variation 1: /note="the nucleotide in position 1 and the nucleotide in position 2 are linked through a phosphorothiate linkage "
  variation 2: /note="U in position 2 is a 2'- fluoro-uridine (fU)"
  variation 2: /note="the nucleotide in position 2 and the nucleotide in position 1 are linked through a phosphorothiate "
  variation 2: /note="the nucleotide in position 2 and the nucleotide in position 3 are linked through a phosphorothiate "
  variation 3: /note="A in position 3 is a 2'-O-Methyladenosine (mA)"
  variation 3: /note="the nucleotide in position 3 and the nucleotide in position 2 are linked through a phosphorothiate linkage "
  variation 4: /note="U in position 4 is a 2'- fluoro-uridine (fU)"
  variation 5: /note="A in position 5 is a 2'-O-Methyladenosine (mA)"
  variation 6: /note="G in position 6 is a 2'-fluoro-guanosine (fG)"
  variation 7: /note="A in position 7 is a 2'-O-Methyladenosine (mA)"
  variation 8: /note="G in position 8 is a 2'-fluoro-guanosine (fG)"
  variation 9: /note="C in position 9 is a 2'-O-Methylcytidine (mC)"
  variation 10: /note="A in position 10 is a 2'-fluoro-adenosine (fA)"
  variation 11: /note="A in position 11 is a 2'-O-Methyladenosine (mA)"
  variation 12: /note="G in position 12 is a lG1b analog"
  variation 13: /note="A in position 13 is a 2'-O-Methyladenosine (mA)"
  variation 14: /note="A in position 14 is a 2'-fluoro-adenosine (fA)"
  variation 15: /note="C in position 15 is a 2'-O-Methylcytidine (mC)"
  variation 16: /note="A in position 16 is a 2'-fluoro-adenosine (fA)"
  variation 17: /note="C in position 17 is a 2'-O-Methylcytidine (mC)"
  variation 18: /note="U in position 18 is a 2'- fluoro-uridine (fU)"
  variation 19: /note="G in position 19 is a 2'-O-Methylguanosine (mG)"
  variation 20: /note="U in position 20 is a 2'- fluoro-uridine (fU)"
  variation 21: /note="U in position 21 is a 2'-O-Methyluridine (mU)"
  variation 21: /note="the nucleotide in position 21 and the nucleotide in position 22 are linked through a phosphorothiate linkage "
  variation 22: /note="U in position 22 is a 2'-O-Methyluridine (mU)"
  variation 22: /note="the nucleotide in position 22 and the nucleotide in position 21 are linked through a phosphorothiate linkage "
  variation 22: /note="the nucleotide in position 22 and the nucleotide in position 23 are linked through a phosphorothiate linkage "
  variation 23: /note="U in position 23 is a 2'-O-Methyluridine (mU)"
  variation 23: /note="the nucleotide in position 23 and the nucleotide in position 22 are linked through a phosphorothiate linkage "
uuauagagcaagaacacuguuuu

SEQ ID NO: 122 - RNA, 23 nt, Artificial Sequence
  as3-54
  variation 1: /note="U in position 1 is a 2'-O-Methyluridine (mU)"
  variation 1: /note="the nucleotide in position 1 and the nucleotide in position 2 are linked through a phosphorothiate linkage "
  variation 2: /note="U in position 2 is a 2'- fluoro-uridine (fU)"
  variation 2: /note="the nucleotide in position 2 and the nucleotide in position 1 are linked through a phosphorothiate "
  variation 2: /note="the nucleotide in position 2 and the nucleotide in position 3 are linked through a phosphorothiate "
  variation 3: /note="A in position 3 is a 2'-O-Methyladenosine (mA)"
  variation 3: /note="the nucleotide in position 3 and the nucleotide in position 2 are linked through a phosphorothiate linkage "
  variation 4: /note="U in position 4 is a 2'- fluoro-uridine (fU)"
  variation 5: /note="A in position 5 is a 2'-O-Methyladenosine (mA)"
  variation 6: /note="G in position 6 is a 2'-fluoro-guanosine (fG)"
  variation 7: /note="A in position 7 is a 2'-O-Methyladenosine (mA)"
  variation 8: /note="G in position 8 is a 2'-fluoro-guanosine (fG)"
  variation 9: /note="C in position 9 is a 2'-O-Methylcytidine (mC)"
  variation 10: /note="A in position 10 is a 2'-fluoro-adenosine (fA)"
  variation 11: /note="A in position 11 is a 2'-O-Methyladenosine (mA)"
  variation 12: /note="G in position 12 is a 2'-O-Methylguanosine (mG)"
  variation 13: /note="A in position 13 is a lA1b analog"
  variation 14: /note="A in position 14 is a 2'-fluoro-adenosine (fA)"
  variation 15: /note="C in position 15 is a 2'-O-Methylcytidine (mC)"
  variation 16: /note="A in position 16 is a 2'-fluoro-adenosine (fA)"
  variation 17: /note="C in position 17 is a 2'-O-Methylcytidine (mC)"
  variation 18: /note="U in position 18 is a 2'- fluoro-uridine (fU)"
  variation 19: /note="G in position 19 is a 2'-O-Methylguanosine (mG)"
  variation 20: /note="U in position 20 is a 2'- fluoro-uridine (fU)"
  variation 21: /note="U in position 21 is a 2'-O-Methyluridine (mU)"
  variation 21: /note="the nucleotide in position 21 and the nucleotide in position 22 are linked through a phosphorothiate linkage "
  variation 22: /note="U in position 22 is a 2'-O-Methyluridine (mU)"
  variation 22: /note="the nucleotide in position 22 and the nucleotide in position 21 are linked through a phosphorothiate linkage "
  variation 22: /note="the nucleotide in position 22 and the nucleotide in position 23 are linked through a phosphorothiate linkage "
  variation 23: /note="U in position 23 is a 2'-O-Methyluridine (mU)"
  variation 23: /note="the nucleotide in position 23 and the nucleotide in position 22 are linked through a phosphorothiate linkage "
uuauagagcaagaacacuguuuu

SEQ ID NO: 123 - RNA, 23 nt, Artificial Sequence
  as3-55
  variation 1: /note="U in position 1 is a 2'-O-Methyluridine (mU)"
  variation 1: /note="the nucleotide in position 1 and the nucleotide in position 2 are linked through a phosphorothiate linkage "
  variation 2: /note="U in position 2 is a 2'- fluoro-uridine (fU)"
  variation 2: /note="the nucleotide in position 2 and the nucleotide in position 1 are linked through a phosphorothiate "
  variation 2: /note="the nucleotide in position 2 and the nucleotide in position 3 are linked through a phosphorothiate "
  variation 3: /note="A in position 3 is a 2'-O-Methyladenosine (mA)"
  variation 3: /note="the nucleotide in position 3 and the nucleotide in position 2 are linked through a phosphorothiate linkage "
  variation 4: /note="U in position 4 is a 2'- fluoro-uridine (fU)"
  variation 5: /note="A in position 5 is a 2'-O-Methyladenosine (mA)"
  variation 6: /note="G in position 6 is a 2'-fluoro-guanosine (fG)"
  variation 7: /note="A in position 7 is a 2'-O-Methyladenosine (mA)"
  variation 8: /note="G in position 8 is a 2'-fluoro-guanosine (fG)"
  variation 9: /note="C in position 9 is a 2'-O-Methylcytidine (mC)"
  variation 10: /note="A in position 10 is a 2'-fluoro-adenosine (fA)"
  variation 11: /note="A in position 11 is a 2'-O-Methyladenosine (mA)"
  variation 12: /note="G in position 12 is a 2'-O-Methylguanosine (mG)"
  variation 13: /note="A in position 13 is a 2'-O-Methyladenosine (mA)"
  variation 14: /note="A in position 14 is a lA1b analog"
  variation 15: /note="C in position 15 is a 2'-O-Methylcytidine (mC)"
  variation 16: /note="A in position 16 is a 2'-fluoro-adenosine (fA)"
  variation 17: /note="C in position 17 is a 2'-O-Methylcytidine (mC)"
  variation 18: /note="U in position 18 is a 2'- fluoro-uridine (fU)"
  variation 19: /note="G in position 19 is a 2'-O-Methylguanosine (mG)"
  variation 20: /note="U in position 20 is a 2'- fluoro-uridine (fU)"
  variation 21: /note="U in position 21 is a 2'-O-Methyluridine (mU)"
  variation 21: /note="the nucleotide in position 21 and the nucleotide in position 22 are linked through a phosphorothiate linkage "
  variation 22: /note="U in position 22 is a 2'-O-Methyluridine (mU)"
  variation 22: /note="the nucleotide in position 22 and the nucleotide in position 21 are linked through a phosphorothiate linkage "
  variation 22: /note="the nucleotide in position 22 and the nucleotide in position 23 are linked through a phosphorothiate linkage "
  variation 23: /note="U in position 23 is a 2'-O-Methyluridine (mU)"
  variation 23: /note="the nucleotide in position 23 and the nucleotide in position 22 are linked through a phosphorothiate linkage "
uuauagagcaagaacacuguuuu

SEQ ID NO: 124 - RNA, 23 nt, Artificial Sequence
  as3-56
  variation 1: /note="U in position 1 is a 2'-O-Methyluridine (mU)"
  variation 1: /note="the nucleotide in position 1 and the nucleotide in position 2 are linked through a phosphorothiate linkage "
  variation 2: /note="U in position 2 is a 2'- fluoro-uridine (fU)"
  variation 2: /note="the nucleotide in position 2 and the nucleotide in position 1 are linked through a phosphorothiate "
  variation 2: /note="the nucleotide in position 2 and the nucleotide in position 3 are linked through a phosphorothiate "
  variation 3: /note="A in position 3 is a 2'-O-Methyladenosine (mA)"
  variation 3: /note="the nucleotide in position 3 and the nucleotide in position 2 are linked through a phosphorothiate linkage "
  variation 4: /note="U in position 4 is a 2'- fluoro-uridine (fU)"
  variation 5: /note="A in position 5 is a 2'-O-Methyladenosine (mA)"
  variation 6: /note="G in position 6 is a 2'-fluoro-guanosine (fG)"
  variation 7: /note="A in position 7 is a 2'-O-Methyladenosine (mA)"
  variation 8: /note="G in position 8 is a 2'-fluoro-guanosine (fG)"
  variation 9: /note="C in position 9 is a 2'-O-Methylcytidine (mC)"
  variation 10: /note="A in position 10 is a 2'-fluoro-adenosine (fA)"
  variation 11: /note="A in position 11 is a 2'-O-Methyladenosine (mA)"
  variation 12: /note="G in position 12 is a 2'-O-Methylguanosine (mG)"
  variation 13: /note="A in position 13 is a 2'-O-Methyladenosine (mA)"
  variation 14: /note="A in position 14 is a 2'-fluoro-adenosine (fA)"
  variation 15: /note="C in position 15 is a lC1b analog"
  variation 16: /note="A in position 16 is a 2'-fluoro-adenosine (fA)"
  variation 17: /note="C in position 17 is a 2'-O-Methylcytidine (mC)"
  variation 18: /note="U in position 18 is a 2'- fluoro-uridine (fU)"
  variation 19: /note="G in position 19 is a 2'-O-Methylguanosine (mG)"
  variation 20: /note="U in position 20 is a 2'- fluoro-uridine (fU)"
  variation 21: /note="U in position 21 is a 2'-O-Methyluridine (mU)"
  variation 21: /note="the nucleotide in position 21 and the nucleotide in position 22 are linked through a phosphorothiate linkage "
  variation 22: /note="U in position 22 is a 2'-O-Methyluridine (mU)"
  variation 22: /note="the nucleotide in position 22 and the nucleotide in position 21 are linked through a phosphorothiate linkage "
  variation 22: /note="the nucleotide in position 22 and the nucleotide in position 23 are linked through a phosphorothiate linkage "
  variation 23: /note="U in position 23 is a 2'-O-Methyluridine (mU)"
  variation 23: /note="the nucleotide in position 23 and the nucleotide in position 22 are linked through a phosphorothiate linkage "
uuauagagcaagaacacuguuuu

SEQ ID NO: 125 - RNA, 23 nt, Artificial Sequence
  as3-57
  variation 1: /note="U in position 1 is a 2'-O-Methyluridine (mU)"
  variation 1: /note="the nucleotide in position 1 and the nucleotide in position 2 are linked through a phosphorothiate linkage "
  variation 2: /note="U in position 2 is a 2'- fluoro-uridine (fU)"
  variation 2: /note="the nucleotide in position 2 and the nucleotide in position 1 are linked through a phosphorothiate "
  variation 2: /note="the nucleotide in position 2 and the nucleotide in position 3 are linked through a phosphorothiate "
  variation 3: /note="A in position 3 is a 2'-O-Methyladenosine (mA)"
  variation 3: /note="the nucleotide in position 3 and the nucleotide in position 2 are linked through a phosphorothiate linkage "
  variation 4: /note="U in position 4 is a 2'- fluoro-uridine (fU)"
  variation 5: /note="A in position 5 is a 2'-O-Methyladenosine (mA)"
  variation 6: /note="G in position 6 is a 2'-fluoro-guanosine (fG)"
  variation 7: /note="A in position 7 is a 2'-O-Methyladenosine (mA)"
  variation 8: /note="G in position 8 is a 2'-fluoro-guanosine (fG)"
  variation 9: /note="C in position 9 is a 2'-O-Methylcytidine (mC)"
  variation 10: /note="A in position 10 is a 2'-fluoro-adenosine (fA)"
  variation 11: /note="A in position 11 is a 2'-O-Methyladenosine (mA)"
  variation 12: /note="G in position 12 is a 2'-O-Methylguanosine (mG)"
  variation 13: /note="A in position 13 is a 2'-O-Methyladenosine (mA)"
  variation 14: /note="A in position 14 is a 2'-fluoro-adenosine (fA)"
  variation 15: /note="C in position 15 is a 2'-O-Methylcytidine (mC)"
  variation 16: /note="A in position 16 is a lA1b analog"
  variation 17: /note="C in position 17 is a 2'-O-Methylcytidine (mC)"
  variation 18: /note="U in position 18 is a 2'- fluoro-uridine (fU)"
  variation 19: /note="G in position 19 is a 2'-O-Methylguanosine (mG)"
  variation 20: /note="U in position 20 is a 2'- fluoro-uridine (fU)"
  variation 21: /note="U in position 21 is a 2'-O-Methyluridine (mU)"
  variation 21: /note="the nucleotide in position 21 and the nucleotide in position 22 are linked through a phosphorothiate linkage "
  variation 22: /note="U in position 22 is a 2'-O-Methyluridine (mU)"
  variation 22: /note="the nucleotide in position 22 and the nucleotide in position 21 are linked through a phosphorothiate linkage "
  variation 22: /note="the nucleotide in position 22 and the nucleotide in position 23 are linked through a phosphorothiate linkage "
  variation 23: /note="U in position 23 is a 2'-O-Methyluridine (mU)"
  variation 23: /note="the nucleotide in position 23 and the nucleotide in position 22 are linked through a phosphorothiate linkage "
uuauagagcaagaacacuguuuu

SEQ ID NO: 126 - RNA, 23 nt, Artificial Sequence
  as3-58
  variation 1: /note="U in position 1 is a 2'-O-Methyluridine (mU)"
  variation 1: /note="the nucleotide in position 1 and the nucleotide in position 2 are linked through a phosphorothiate linkage "
  variation 2: /note="U in position 2 is a 2'- fluoro-uridine (fU)"
  variation 2: /note="the nucleotide in position 2 and the nucleotide in position 1 are linked through a phosphorothiate "
  variation 2: /note="the nucleotide in position 2 and the nucleotide in position 3 are linked through a phosphorothiate "
  variation 3: /note="A in position 3 is a 2'-O-Methyladenosine (mA)"
  variation 3: /note="the nucleotide in position 3 and the nucleotide in position 2 are linked through a phosphorothiate linkage "
  variation 4: /note="U in position 4 is a 2'- fluoro-uridine (fU)"
  variation 5: /note="A in position 5 is a 2'-O-Methyladenosine (mA)"
  variation 6: /note="G in position 6 is a 2'-fluoro-guanosine (fG)"
  variation 7: /note="A in position 7 is a 2'-O-Methyladenosine (mA)"
  variation 8: /note="G in position 8 is a 2'-fluoro-guanosine (fG)"
  variation 9: /note="C in position 9 is a 2'-O-Methylcytidine (mC)"
  variation 10: /note="A in position 10 is a 2'-fluoro-adenosine (fA)"
  variation 11: /note="A in position 11 is a 2'-O-Methyladenosine (mA)"
  variation 12: /note="G in position 12 is a 2'-O-Methylguanosine (mG)"
  variation 13: /note="A in position 13 is a 2'-O-Methyladenosine (mA)"
  variation 14: /note="A in position 14 is a 2'-fluoro-adenosine (fA)"
  variation 15: /note="C in position 15 is a 2'-O-Methylcytidine (mC)"
  variation 16: /note="A in position 16 is a 2'-fluoro-adenosine (fA)"
  variation 17: /note="C in position 17 is a lC1b analog"
  variation 18: /note="U in position 18 is a 2'- fluoro-uridine (fU)"
  variation 19: /note="G in position 19 is a 2'-O-Methylguanosine (mG)"
  variation 20: /note="U in position 20 is a 2'- fluoro-uridine (fU)"
  variation 21: /note="U in position 21 is a 2'-O-Methyluridine (mU)"
  variation 21: /note="the nucleotide in position 21 and the nucleotide in position 22 are linked through a phosphorothiate linkage "
  variation 22: /note="U in position 22 is a 2'-O-Methyluridine (mU)"
  variation 22: /note="the nucleotide in position 22 and the nucleotide in position 21 are linked through a phosphorothiate linkage "
  variation 22: /note="the nucleotide in position 22 and the nucleotide in position 23 are linked through a phosphorothiate linkage "
  variation 23: /note="U in position 23 is a 2'-O-Methyluridine (mU)"
  variation 23: /note="the nucleotide in position 23 and the nucleotide in position 22 are linked through a phosphorothiate linkage "
uuauagagcaagaacacuguuuu

SEQ ID NO: 127 - RNA, 23 nt, Artificial Sequence
  as3-59
  variation 1: /note="U in position 1 is a 2'-O-Methyluridine (mU)"
  variation 1: /note="the nucleotide in position 1 and the nucleotide in position 2 are linked through a phosphorothiate linkage "
  variation 2: /note="U in position 2 is a 2'- fluoro-uridine (fU)"
  variation 2: /note="the nucleotide in position 2 and the nucleotide in position 1 are linked through a phosphorothiate "
  variation 2: /note="the nucleotide in position 2 and the nucleotide in position 3 are linked through a phosphorothiate "
  variation 3: /note="A in position 3 is a 2'-O-Methyladenosine (mA)"
  variation 3: /note="the nucleotide in position 3 and the nucleotide in position 2 are linked through a phosphorothiate linkage "
  variation 4: /note="U in position 4 is a 2'- fluoro-uridine (fU)"
  variation 5: /note="A in position 5 is a 2'-O-Methyladenosine (mA)"
  variation 6: /note="G in position 6 is a 2'-fluoro-guanosine (fG)"
  variation 7: /note="A in position 7 is a 2'-O-Methyladenosine (mA)"
  variation 8: /note="G in position 8 is a 2'-fluoro-guanosine (fG)"
  variation 9: /note="C in position 9 is a 2'-O-Methylcytidine (mC)"
  variation 10: /note="A in position 10 is a 2'-fluoro-adenosine (fA)"
  variation 11: /note="A in position 11 is a 2'-O-Methyladenosine (mA)"
  variation 12: /note="G in position 12 is a 2'-O-Methylguanosine (mG)"
  variation 13: /note="A in position 13 is a 2'-O-Methyladenosine (mA)"
  variation 14: /note="A in position 14 is a 2'-fluoro-adenosine (fA)"
  variation 15: /note="C in position 15 is a 2'-O-Methylcytidine (mC)"
  variation 16: /note="A in position 16 is a 2'-fluoro-adenosine (fA)"
  variation 17: /note="C in position 17 is a 2'-O-Methylcytidine (mC)"
  variation 18: /note="U in position 18 is a lU1b analog"
  variation 19: /note="G in position 19 is a 2'-O-Methylguanosine (mG)"
  variation 20: /note="U in position 20 is a 2'- fluoro-uridine (fU)"
  variation 21: /note="U in position 21 is a 2'-O-Methyluridine (mU)"
  variation 21: /note="the nucleotide in position 21 and the nucleotide in position 22 are linked through a phosphorothiate linkage "
  variation 22: /note="U in position 22 is a 2'-O-Methyluridine (mU)"
  variation 22: /note="the nucleotide in position 22 and the nucleotide in position 21 are linked through a phosphorothiate linkage "
  variation 22: /note="the nucleotide in position 22 and the nucleotide in position 23 are linked through a phosphorothiate linkage "
  variation 23: /note="U in position 23 is a 2'-O-Methyluridine (mU)"
  variation 23: /note="the nucleotide in position 23 and the nucleotide in position 22 are linked through a phosphorothiate linkage "
uuauagagcaagaacacuguuuu

SEQ ID NO: 128 - RNA, 23 nt, Artificial Sequence
  as3-60
  variation 1: /note="U in position 1 is a 2'-O-Methyluridine (mU)"
  variation 1: /note="the nucleotide in position 1 and the nucleotide in position 2 are linked through a phosphorothiate linkage "
  variation 2: /note="U in position 2 is a 2'- fluoro-uridine (fU)"
  variation 2: /note="the nucleotide in position 2 and the nucleotide in position 1 are linked through a phosphorothiate "
  variation 2: /note="the nucleotide in position 2 and the nucleotide in position 3 are linked through a phosphorothiate "
  variation 3: /note="A in position 3 is a 2'-O-Methyladenosine (mA)"
  variation 3: /note="the nucleotide in position 3 and the nucleotide in position 2 are linked through a phosphorothiate linkage "
  variation 4: /note="U in position 4 is a 2'- fluoro-uridine (fU)"
  variation 5: /note="A in position 5 is a 2'-O-Methyladenosine (mA)"
  variation 6: /note="G in position 6 is a 2'-fluoro-guanosine (fG)"
  variation 7: /note="A in position 7 is a 2'-O-Methyladenosine (mA)"
  variation 8: /note="G in position 8 is a 2'-fluoro-guanosine (fG)"
  variation 9: /note="C in position 9 is a 2'-O-Methylcytidine (mC)"
  variation 10: /note="A in position 10 is a 2'-fluoro-adenosine (fA)"
  variation 11: /note="A in position 11 is a 2'-O-Methyladenosine (mA)"
  variation 12: /note="G in position 12 is a 2'-O-Methylguanosine (mG)"
  variation 13: /note="A in position 13 is a 2'-O-Methyladenosine (mA)"
  variation 14: /note="A in position 14 is a 2'-fluoro-adenosine (fA)"
  variation 15: /note="C in position 15 is a 2'-O-Methylcytidine (mC)"
  variation 16: /note="A in position 16 is a 2'-fluoro-adenosine (fA)"
  variation 17: /note="C in position 17 is a 2'-O-Methylcytidine (mC)"
  variation 18: /note="U in position 18 is a 2'- fluoro-uridine (fU)"
  variation 19: /note="G in position 19 is a lG1b analog"
  variation 20: /note="U in position 20 is a 2'- fluoro-uridine (fU)"
  variation 21: /note="U in position 21 is a 2'-O-Methyluridine (mU)"
  variation 21: /note="the nucleotide in position 21 and the nucleotide in position 22 are linked through a phosphorothiate linkage "
  variation 22: /note="U in position 22 is a 2'-O-Methyluridine (mU)"
  variation 22: /note="the nucleotide in position 22 and the nucleotide in position 21 are linked through a phosphorothiate linkage "
  variation 22: /note="the nucleotide in position 22 and the nucleotide in position 23 are linked through a phosphorothiate linkage "
  variation 23: /note="U in position 23 is a 2'-O-Methyluridine (mU)"
  variation 23: /note="the nucleotide in position 23 and the nucleotide in position 22 are linked through a phosphorothiate linkage "
uuauagagcaagaacacuguuuu

SEQ ID NO: 129 - RNA, 23 nt, Artificial Sequence
  as3-61
  variation 1: /note="U in position 1 is a 2'-O-Methyluridine (mU)"
  variation 1: /note="the nucleotide in position 1 and the nucleotide in position 2 are linked through a phosphorothiate linkage "
  variation 2: /note="U in position 2 is a 2'- fluoro-uridine (fU)"
  variation 2: /note="the nucleotide in position 2 and the nucleotide in position 1 are linked through a phosphorothiate "
  variation 2: /note="the nucleotide in position 2 and the nucleotide in position 3 are linked through a phosphorothiate "
  variation 3: /note="A in position 3 is a 2'-O-Methyladenosine (mA)"
  variation 3: /note="the nucleotide in position 3 and the nucleotide in position 2 are linked through a phosphorothiate linkage "
  variation 4: /note="U in position 4 is a 2'- fluoro-uridine (fU)"
  variation 5: /note="A in position 5 is a 2'-O-Methyladenosine (mA)"
  variation 6: /note="G in position 6 is a 2'-fluoro-guanosine (fG)"
  variation 7: /note="A in position 7 is a 2'-O-Methyladenosine (mA)"
  variation 8: /note="G in position 8 is a 2'-fluoro-guanosine (fG)"
  variation 9: /note="C in position 9 is a 2'-O-Methylcytidine (mC)"
  variation 10: /note="A in position 10 is a 2'-fluoro-adenosine (fA)"
  variation 11: /note="A in position 11 is a 2'-O-Methyladenosine (mA)"
  variation 12: /note="G in position 12 is a 2'-O-Methylguanosine (mG)"
  variation 13: /note="A in position 13 is a 2'-O-Methyladenosine (mA)"
  variation 14: /note="A in position 14 is a 2'-fluoro-adenosine (fA)"
  variation 15: /note="C in position 15 is a 2'-O-Methylcytidine (mC)"
  variation 16: /note="A in position 16 is a 2'-fluoro-adenosine (fA)"
  variation 17: /note="C in position 17 is a 2'-O-Methylcytidine (mC)"
  variation 18: /note="U in position 18 is a 2'- fluoro-uridine (fU)"
  variation 19: /note="G in position 19 is a 2'-O-Methylguanosine (mG)"
  variation 20: /note="U in position 20 is a lU1b analog"
  variation 21: /note="U in position 21 is a 2'-O-Methyluridine (mU)"
  variation 21: /note="the nucleotide in position 21 and the nucleotide in position 22 are linked through a phosphorothiate linkage "
  variation 22: /note="U in position 22 is a 2'-O-Methyluridine (mU)"
  variation 22: /note="the nucleotide in position 22 and the nucleotide in position 21 are linked through a phosphorothiate linkage "
  variation 22: /note="the nucleotide in position 22 and the nucleotide in position 23 are linked through a phosphorothiate linkage "
  variation 23: /note="U in position 23 is a 2'-O-Methyluridine (mU)"
  variation 23: /note="the nucleotide in position 23 and the nucleotide in position 22 are linked through a phosphorothiate linkage "
uuauagagcaagaacacuguuuu

SEQ ID NO: 130 - RNA, 23 nt, Artificial Sequence
  as3-62
  variation 1: /note="U in position 1 is a 2'-O-Methyluridine (mU)"
  variation 1: /note="the nucleotide in position 1 and the nucleotide in position 2 are linked through a phosphorothiate linkage "
  variation 2: /note="U in position 2 is a 2'- fluoro-uridine (fU)"
  variation 2: /note="the nucleotide in position 2 and the nucleotide in position 1 are linked through a phosphorothiate "
  variation 2: /note="the nucleotide in position 2 and the nucleotide in position 3 are linked through a phosphorothiate "
  variation 3: /note="A in position 3 is a 2'-O-Methyladenosine (mA)"
  variation 3: /note="the nucleotide in position 3 and the nucleotide in position 2 are linked through a phosphorothiate linkage "
  variation 4: /note="U in position 4 is a 2'- fluoro-uridine (fU)"
  variation 5: /note="A in position 5 is a 2'-O-Methyladenosine (mA)"
  variation 6: /note="G in position 6 is a 2'-fluoro-guanosine (fG)"
  variation 7: /note="A in position 7 is a 2'-O-Methyladenosine (mA)"
  variation 8: /note="G in position 8 is a 2'-fluoro-guanosine (fG)"
  variation 9: /note="C in position 9 is a 2'-O-Methylcytidine (mC)"
  variation 10: /note="A in position 10 is a 2'-fluoro-adenosine (fA)"
  variation 11: /note="A in position 11 is a 2'-O-Methyladenosine (mA)"
  variation 12: /note="G in position 12 is a 2'-O-Methylguanosine (mG)"
  variation 13: /note="A in position 13 is a 2'-O-Methyladenosine (mA)"
  variation 14: /note="A in position 14 is a 2'-fluoro-adenosine (fA)"
  variation 15: /note="C in position 15 is a 2'-O-Methylcytidine (mC)"
  variation 16: /note="A in position 16 is a 2'-fluoro-adenosine (fA)"
  variation 17: /note="C in position 17 is a 2'-O-Methylcytidine (mC)"
  variation 18: /note="U in position 18 is a 2'- fluoro-uridine (fU)"
  variation 19: /note="G in position 19 is a 2'-O-Methylguanosine (mG)"
  variation 20: /note="U in position 20 is a 2'- fluoro-uridine (fU)"
  variation 21: /note="U in position 21 is a lU1b analog"
  variation 21: /note="the nucleotide in position 21 and the nucleotide in position 22 are linked through a phosphorothiate linkage "
  variation 22: /note="U in position 22 is a 2'-O-Methyluridine (mU)"
  variation 22: /note="the nucleotide in position 22 and the nucleotide in position 21 are linked through a phosphorothiate linkage "
  variation 22: /note="the nucleotide in position 22 and the nucleotide in position 23 are linked through a phosphorothiate linkage "
  variation 23: /note="U in position 23 is a 2'-O-Methyluridine (mU)"
  variation 23: /note="the nucleotide in position 23 and the nucleotide in position 22 are linked through a phosphorothiate linkage "
uuauagagcaagaacacuguuuu

SEQ ID NO: 131 - RNA, 23 nt, Artificial Sequence
  as3-63
  variation 1: /note="U in position 1 is a lU1b analog"
  variation 1: /note="the nucleotide in position 1 and the nucleotide in position 2 are linked through a phosphorothiate linkage "
  variation 2: /note="U in position 2 is a 2'- fluoro-uridine (fU)"
  variation 2: /note="the nucleotide in position 2 and the nucleotide in position 1 are linked through a phosphorothiate "
  variation 2: /note="the nucleotide in position 2 and the nucleotide in position 3 are linked through a phosphorothiate "
  variation 3: /note="A in position 3 is a 2'-O-Methyladenosine (mA)"
  variation 3: /note="the nucleotide in position 3 and the nucleotide in position 2 are linked through a phosphorothiate linkage "
  variation 4: /note="U in position 4 is a 2'- fluoro-uridine (fU)"
  variation 5: /note="A in position 5 is a 2'-O-Methyladenosine (mA)"
  variation 6: /note="G in position 6 is a 2'-fluoro-guanosine (fG)"
  variation 7: /note="A in position 7 is a lA1b analog"
  variation 8: /note="G in position 8 is a 2'-fluoro-guanosine (fG)"
  variation 9: /note="C in position 9 is a 2'-O-Methylcytidine (mC)"
  variation 10: /note="A in position 10 is a 2'-fluoro-adenosine (fA)"
  variation 11: /note="A in position 11 is a 2'-O-Methyladenosine (mA)"
  variation 12: /note="G in position 12 is a 2'-O-Methylguanosine (mG)"
  variation 13: /note="A in position 13 is a 2'-O-Methyladenosine (mA)"
  variation 14: /note="A in position 14 is a 2'-fluoro-adenosine (fA)"
  variation 15: /note="C in position 15 is a 2'-O-Methylcytidine (mC)"
  variation 16: /note="A in position 16 is a 2'-fluoro-adenosine (fA)"
  variation 17: /note="C in position 17 is a 2'-O-Methylcytidine (mC)"
  variation 18: /note="U in position 18 is a 2'- fluoro-uridine (fU)"
  variation 19: /note="G in position 19 is a 2'-O-Methylguanosine (mG)"
  variation 20: /note="U in position 20 is a 2'- fluoro-uridine (fU)"
  variation 21: /note="U in position 21 is a 2'-O-Methyluridine (mU)"
  variation 21: /note="the nucleotide in position 21 and the nucleotide in position 22 are linked through a phosphorothiate linkage "
  variation 22: /note="U in position 22 is a 2'-O-Methyluridine (mU)"
  variation 22: /note="the nucleotide in position 22 and the nucleotide in position 21 are linked through a phosphorothiate linkage "
  variation 22: /note="the nucleotide in position 22 and the nucleotide in position 23 are linked through a phosphorothiate linkage "
  variation 23: /note="U in position 23 is a 2'-O-Methyluridine (mU)"
  variation 23: /note="the nucleotide in position 23 and the nucleotide in position 22 are linked through a phosphorothiate linkage "
uuauagagcaagaacacuguuuu

SEQ ID NO: 132 - RNA, 23 nt, Artificial Sequence
  as3-64
  variation 1: /note="U in position 1 is a 2'-O-Methyluridine (mU)"
  variation 1: /note="the nucleotide in position 1 and the nucleotide in position 2 are linked through a phosphorothiate linkage "
  variation 2: /note="U in position 2 is a lU1b analog"
  variation 2: /note="the nucleotide in position 2 and the nucleotide in position 1 are linked through a phosphorothiate "
  variation 2: /note="the nucleotide in position 2 and the nucleotide in position 3 are linked through a phosphorothiate "
  variation 3: /note="A in position 3 is a 2'-O-Methyladenosine (mA)"
  variation 3: /note="the nucleotide in position 3 and the nucleotide in position 2 are linked through a phosphorothiate linkage "
  variation 4: /note="U in position 4 is a 2'- fluoro-uridine (fU)"
  variation 5: /note="A in position 5 is a 2'-O-Methyladenosine (mA)"
  variation 6: /note="G in position 6 is a 2'-fluoro-guanosine (fG)"
  variation 7: /note="A in position 7 is a lA1b analog"
  variation 8: /note="G in position 8 is a 2'-fluoro-guanosine (fG)"
  variation 9: /note="C in position 9 is a 2'-O-Methylcytidine (mC)"
  variation 10: /note="A in position 10 is a 2'-fluoro-adenosine (fA)"
  variation 11: /note="A in position 11 is a 2'-O-Methyladenosine (mA)"
  variation 12: /note="G in position 12 is a 2'-O-Methylguanosine (mG)"
  variation 13: /note="A in position 13 is a 2'-O-Methyladenosine (mA)"
  variation 14: /note="A in position 14 is a 2'-fluoro-adenosine (fA)"
  variation 15: /note="C in position 15 is a 2'-O-Methylcytidine (mC)"
  variation 16: /note="A in position 16 is a 2'-fluoro-adenosine (fA)"
  variation 17: /note="C in position 17 is a 2'-O-Methylcytidine (mC)"
  variation 18: /note="U in position 18 is a 2'- fluoro-uridine (fU)"
  variation 19: /note="G in position 19 is a 2'-O-Methylguanosine (mG)"
  variation 20: /note="U in position 20 is a 2'- fluoro-uridine (fU)"
  variation 21: /note="U in position 21 is a 2'-O-Methyluridine (mU)"
  variation 21: /note="the nucleotide in position 21 and the nucleotide in position 22 are linked through a phosphorothiate linkage "
  variation 22: /note="U in position 22 is a 2'-O-Methyluridine (mU)"
  variation 22: /note="the nucleotide in position 22 and the nucleotide in position 21 are linked through a phosphorothiate linkage "
  variation 22: /note="the nucleotide in position 22 and the nucleotide in position 23 are linked through a phosphorothiate linkage "
  variation 23: /note="U in position 23 is a 2'-O-Methyluridine (mU)"
  variation 23: /note="the nucleotide in position 23 and the nucleotide in position 22 are linked through a phosphorothiate linkage "
uuauagagcaagaacacuguuuu

SEQ ID NO: 133 - RNA, 23 nt, Artificial Sequence
  as3-65
  variation 1: /note="U in position 1 is a 2'-O-Methyluridine (mU)"
  variation 1: /note="the nucleotide in position 1 and the nucleotide in position 2 are linked through a phosphorothiate linkage "
  variation 2: /note="U in position 2 is a 2'- fluoro-uridine (fU)"
  variation 2: /note="the nucleotide in position 2 and the nucleotide in position 1 are linked through a phosphorothiate "
  variation 2: /note="the nucleotide in position 2 and the nucleotide in position 3 are linked through a phosphorothiate "
  variation 3: /note="A in position 3 is a lA1b analog"
  variation 3: /note="the nucleotide in position 3 and the nucleotide in position 2 are linked through a phosphorothiate linkage "
  variation 4: /note="U in position 4 is a 2'- fluoro-uridine (fU)"
  variation 5: /note="A in position 5 is a 2'-O-Methyladenosine (mA)"
  variation 6: /note="G in position 6 is a 2'-fluoro-guanosine (fG)"
  variation 7: /note="A in position 7 is a lA1b analog"
  variation 8: /note="G in position 8 is a 2'-fluoro-guanosine (fG)"
  variation 9: /note="C in position 9 is a 2'-O-Methylcytidine (mC)"
  variation 10: /note="A in position 10 is a 2'-fluoro-adenosine (fA)"
  variation 11: /note="A in position 11 is a 2'-O-Methyladenosine (mA)"
  variation 12: /note="G in position 12 is a 2'-O-Methylguanosine (mG)"
  variation 13: /note="A in position 13 is a 2'-O-Methyladenosine (mA)"
  variation 14: /note="A in position 14 is a 2'-fluoro-adenosine (fA)"
  variation 15: /note="C in position 15 is a 2'-O-Methylcytidine (mC)"
  variation 16: /note="A in position 16 is a 2'-fluoro-adenosine (fA)"
  variation 17: /note="C in position 17 is a 2'-O-Methylcytidine (mC)"
  variation 18: /note="U in position 18 is a 2'- fluoro-uridine (fU)"
  variation 19: /note="G in position 19 is a 2'-O-Methylguanosine (mG)"
  variation 20: /note="U in position 20 is a 2'- fluoro-uridine (fU)"
  variation 21: /note="U in position 21 is a 2'-O-Methyluridine (mU)"
  variation 21: /note="the nucleotide in position 21 and the nucleotide in position 22 are linked through a phosphorothiate linkage "
  variation 22: /note="U in position 22 is a 2'-O-Methyluridine (mU)"
  variation 22: /note="the nucleotide in position 22 and the nucleotide in position 21 are linked through a phosphorothiate linkage "
  variation 22: /note="the nucleotide in position 22 and the nucleotide in position 23 are linked through a phosphorothiate linkage "
  variation 23: /note="U in position 23 is a 2'-O-Methyluridine (mU)"
  variation 23: /note="the nucleotide in position 23 and the nucleotide in position 22 are linked through a phosphorothiate linkage "
uuauagagcaagaacacuguuuu

SEQ ID NO: 134 - RNA, 23 nt, Artificial Sequence
  as3-66
  variation 1: /note="U in position 1 is a 2'-O-Methyluridine (mU)"
  variation 1: /note="the nucleotide in position 1 and the nucleotide in position 2 are linked through a phosphorothiate linkage "
  variation 2: /note="U in position 2 is a 2'- fluoro-uridine (fU)"
  variation 2: /note="the nucleotide in position 2 and the nucleotide in position 1 are linked through a phosphorothiate "
  variation 2: /note="the nucleotide in position 2 and the nucleotide in position 3 are linked through a phosphorothiate "
  variation 3: /note="A in position 3 is a 2'-O-Methyladenosine (mA)"
  variation 3: /note="the nucleotide in position 3 and the nucleotide in position 2 are linked through a phosphorothiate linkage "
  variation 4: /note="U in position 4 is a lU1b analog"
  variation 5: /note="A in position 5 is a 2'-O-Methyladenosine (mA)"
  variation 6: /note="G in position 6 is a 2'-fluoro-guanosine (fG)"
  variation 7: /note="A in position 7 is a lA1b analog"
  variation 8: /note="G in position 8 is a 2'-fluoro-guanosine (fG)"
  variation 9: /note="C in position 9 is a 2'-O-Methylcytidine (mC)"
  variation 10: /note="A in position 10 is a 2'-fluoro-adenosine (fA)"
  variation 11: /note="A in position 11 is a 2'-O-Methyladenosine (mA)"
  variation 12: /note="G in position 12 is a 2'-O-Methylguanosine (mG)"
  variation 13: /note="A in position 13 is a 2'-O-Methyladenosine (mA)"
  variation 14: /note="A in position 14 is a 2'-fluoro-adenosine (fA)"
  variation 15: /note="C in position 15 is a 2'-O-Methylcytidine (mC)"
  variation 16: /note="A in position 16 is a 2'-fluoro-adenosine (fA)"
  variation 17: /note="C in position 17 is a 2'-O-Methylcytidine (mC)"
  variation 18: /note="U in position 18 is a 2'- fluoro-uridine (fU)"
  variation 19: /note="G in position 19 is a 2'-O-Methylguanosine (mG)"
  variation 20: /note="U in position 20 is a 2'- fluoro-uridine (fU)"
  variation 21: /note="U in position 21 is a 2'-O-Methyluridine (mU)"
  variation 21: /note="the nucleotide in position 21 and the nucleotide in position 22 are linked through a phosphorothiate linkage "
  variation 22: /note="U in position 22 is a 2'-O-Methyluridine (mU)"
  variation 22: /note="the nucleotide in position 22 and the nucleotide in position 21 are linked through a phosphorothiate linkage "
  variation 22: /note="the nucleotide in position 22 and the nucleotide in position 23 are linked through a phosphorothiate linkage "
  variation 23: /note="U in position 23 is a 2'-O-Methyluridine (mU)"
  variation 23: /note="the nucleotide in position 23 and the nucleotide in position 22 are linked through a phosphorothiate linkage "
uuauagagcaagaacacuguuuu

SEQ ID NO: 135 - RNA, 23 nt, Artificial Sequence
  as3-67
  variation 1: /note="U in position 1 is a 2'-O-Methyluridine (mU)"
  variation 1: /note="the nucleotide in position 1 and the nucleotide in position 2 are linked through a phosphorothiate linkage "
  variation 2: /note="U in position 2 is a 2'- fluoro-uridine (fU)"
  variation 2: /note="the nucleotide in position 2 and the nucleotide in position 1 are linked through a phosphorothiate "
  variation 2: /note="the nucleotide in position 2 and the nucleotide in position 3 are linked through a phosphorothiate "
  variation 3: /note="A in position 3 is a 2'-O-Methyladenosine (mA)"
  variation 3: /note="the nucleotide in position 3 and the nucleotide in position 2 are linked through a phosphorothiate linkage "
  variation 4: /note="U in position 4 is a 2'- fluoro-uridine (fU)"
  variation 5: /note="A in position 5 is a lA1b analog"
  variation 6: /note="G in position 6 is a 2'-fluoro-guanosine (fG)"
  variation 7: /note="A in position 7 is a lA1b analog"
  variation 8: /note="G in position 8 is a 2'-fluoro-guanosine (fG)"
  variation 9: /note="C in position 9 is a 2'-O-Methylcytidine (mC)"
  variation 10: /note="A in position 10 is a 2'-fluoro-adenosine (fA)"
  variation 11: /note="A in position 11 is a 2'-O-Methyladenosine (mA)"
  variation 12: /note="G in position 12 is a 2'-O-Methylguanosine (mG)"
  variation 13: /note="A in position 13 is a 2'-O-Methyladenosine (mA)"
  variation 14: /note="A in position 14 is a 2'-fluoro-adenosine (fA)"
  variation 15: /note="C in position 15 is a 2'-O-Methylcytidine (mC)"
  variation 16: /note="A in position 16 is a 2'-fluoro-adenosine (fA)"
  variation 17: /note="C in position 17 is a 2'-O-Methylcytidine (mC)"
  variation 18: /note="U in position 18 is a 2'- fluoro-uridine (fU)"
  variation 19: /note="G in position 19 is a 2'-O-Methylguanosine (mG)"
  variation 20: /note="U in position 20 is a 2'- fluoro-uridine (fU)"
  variation 21: /note="U in position 21 is a 2'-O-Methyluridine (mU)"
  variation 21: /note="the nucleotide in position 21 and the nucleotide in position 22 are linked through a phosphorothiate linkage "
  variation 22: /note="U in position 22 is a 2'-O-Methyluridine (mU)"
  variation 22: /note="the nucleotide in position 22 and the nucleotide in position 21 are linked through a phosphorothiate linkage "
  variation 22: /note="the nucleotide in position 22 and the nucleotide in position 23 are linked through a phosphorothiate linkage "
  variation 23: /note="U in position 23 is a 2'-O-Methyluridine (mU)"
  variation 23: /note="the nucleotide in position 23 and the nucleotide in position 22 are linked through a phosphorothiate linkage "
uuauagagcaagaacacuguuuu

SEQ ID NO: 136 - RNA, 23 nt, Artificial Sequence
  as3-68
  variation 1: /note="U in position 1 is a 2'-O-Methyluridine (mU)"
  variation 1: /note="the nucleotide in position 1 and the nucleotide in position 2 are linked through a phosphorothiate linkage "
  variation 2: /note="U in position 2 is a 2'- fluoro-uridine (fU)"
  variation 2: /note="the nucleotide in position 2 and the nucleotide in position 1 are linked through a phosphorothiate "
  variation 2: /note="the nucleotide in position 2 and the nucleotide in position 3 are linked through a phosphorothiate "
  variation 3: /note="A in position 3 is a 2'-O-Methyladenosine (mA)"
  variation 3: /note="the nucleotide in position 3 and the nucleotide in position 2 are linked through a phosphorothiate linkage "
  variation 4: /note="U in position 4 is a 2'- fluoro-uridine (fU)"
  variation 5: /note="A in position 5 is a 2'-O-Methyladenosine (mA)"
  variation 6: /note="G in position 6 is a lG1b analog"
  variation 7: /note="A in position 7 is a lA1b analog"
  variation 8: /note="G in position 8 is a 2'-fluoro-guanosine (fG)"
  variation 9: /note="C in position 9 is a 2'-O-Methylcytidine (mC)"
  variation 10: /note="A in position 10 is a 2'-fluoro-adenosine (fA)"
  variation 11: /note="A in position 11 is a 2'-O-Methyladenosine (mA)"
  variation 12: /note="G in position 12 is a 2'-O-Methylguanosine (mG)"
  variation 13: /note="A in position 13 is a 2'-O-Methyladenosine (mA)"
  variation 14: /note="A in position 14 is a 2'-fluoro-adenosine (fA)"
  variation 15: /note="C in position 15 is a 2'-O-Methylcytidine (mC)"
  variation 16: /note="A in position 16 is a 2'-fluoro-adenosine (fA)"
  variation 17: /note="C in position 17 is a 2'-O-Methylcytidine (mC)"
  variation 18: /note="U in position 18 is a 2'- fluoro-uridine (fU)"
  variation 19: /note="G in position 19 is a 2'-O-Methylguanosine (mG)"
  variation 20: /note="U in position 20 is a 2'- fluoro-uridine (fU)"
  variation 21: /note="U in position 21 is a 2'-O-Methyluridine (mU)"
  variation 21: /note="the nucleotide in position 21 and the nucleotide in position 22 are linked through a phosphorothiate linkage "
  variation 22: /note="U in position 22 is a 2'-O-Methyluridine (mU)"
  variation 22: /note="the nucleotide in position 22 and the nucleotide in position 21 are linked through a phosphorothiate linkage "
  variation 22: /note="the nucleotide in position 22 and the nucleotide in position 23 are linked through a phosphorothiate linkage "
  variation 23: /note="U in position 23 is a 2'-O-Methyluridine (mU)"
  variation 23: /note="the nucleotide in position 23 and the nucleotide in position 22 are linked through a phosphorothiate linkage "
uuauagagcaagaacacuguuuu

SEQ ID NO: 137 - RNA, 23 nt, Artificial Sequence
  as3-69
  variation 1: /note="U in position 1 is a 2'-O-Methyluridine (mU)"
  variation 1: /note="the nucleotide in position 1 and the nucleotide in position 2 are linked through a phosphorothiate linkage "
  variation 2: /note="U in position 2 is a 2'- fluoro-uridine (fU)"
  variation 2: /note="the nucleotide in position 2 and the nucleotide in position 1 are linked through a phosphorothiate "
  variation 2: /note="the nucleotide in position 2 and the nucleotide in position 3 are linked through a phosphorothiate "
  variation 3: /note="A in position 3 is a 2'-O-Methyladenosine (mA)"
  variation 3: /note="the nucleotide in position 3 and the nucleotide in position 2 are linked through a phosphorothiate linkage "
  variation 4: /note="U in position 4 is a 2'- fluoro-uridine (fU)"
  variation 5: /note="A in position 5 is a 2'-O-Methyladenosine (mA)"
  variation 6: /note="G in position 6 is a 2'-fluoro-guanosine (fG)"
  variation 7: /note="A in position 7 is a lA1b analog"
  variation 8: /note="G in position 8 is a lG1b analog"
  variation 9: /note="C in position 9 is a 2'-O-Methylcytidine (mC)"
  variation 10: /note="A in position 10 is a 2'-fluoro-adenosine (fA)"
  variation 11: /note="A in position 11 is a 2'-O-Methyladenosine (mA)"
  variation 12: /note="G in position 12 is a 2'-O-Methylguanosine (mG)"
  variation 13: /note="A in position 13 is a 2'-O-Methyladenosine (mA)"
  variation 14: /note="A in position 14 is a 2'-fluoro-adenosine (fA)"
  variation 15: /note="C in position 15 is a 2'-O-Methylcytidine (mC)"
  variation 16: /note="A in position 16 is a 2'-fluoro-adenosine (fA)"
  variation 17: /note="C in position 17 is a 2'-O-Methylcytidine (mC)"
  variation 18: /note="U in position 18 is a 2'- fluoro-uridine (fU)"
  variation 19: /note="G in position 19 is a 2'-O-Methylguanosine (mG)"
  variation 20: /note="U in position 20 is a 2'- fluoro-uridine (fU)"
  variation 21: /note="U in position 21 is a 2'-O-Methyluridine (mU)"
  variation 21: /note="the nucleotide in position 21 and the nucleotide in position 22 are linked through a phosphorothiate linkage "
  variation 22: /note="U in position 22 is a 2'-O-Methyluridine (mU)"
  variation 22: /note="the nucleotide in position 22 and the nucleotide in position 21 are linked through a phosphorothiate linkage "
  variation 22: /note="the nucleotide in position 22 and the nucleotide in position 23 are linked through a phosphorothiate linkage "
  variation 23: /note="U in position 23 is a 2'-O-Methyluridine (mU)"
  variation 23: /note="the nucleotide in position 23 and the nucleotide in position 22 are linked through a phosphorothiate linkage "
uuauagagcaagaacacuguuuu

SEQ ID NO: 138 - RNA, 23 nt, Artificial Sequence
  as3-70
  variation 1: /note="U in position 1 is a 2'-O-Methyluridine (mU)"
  variation 1: /note="the nucleotide in position 1 and the nucleotide in position 2 are linked through a phosphorothiate linkage "
  variation 2: /note="U in position 2 is a 2'- fluoro-uridine (fU)"
  variation 2: /note="the nucleotide in position 2 and the nucleotide in position 1 are linked through a phosphorothiate "
  variation 2: /note="the nucleotide in position 2 and the nucleotide in position 3 are linked through a phosphorothiate "
  variation 3: /note="A in position 3 is a 2'-O-Methyladenosine (mA)"
  variation 3: /note="the nucleotide in position 3 and the nucleotide in position 2 are linked through a phosphorothiate linkage "
  variation 4: /note="U in position 4 is a 2'- fluoro-uridine (fU)"
  variation 5: /note="A in position 5 is a 2'-O-Methyladenosine (mA)"
  variation 6: /note="G in position 6 is a 2'-fluoro-guanosine (fG)"
  variation 7: /note="A in position 7 is a lA1b analog"
  variation 8: /note="G in position 8 is a 2'-fluoro-guanosine (fG)"
  variation 9: /note="C in position 9 is a lC1b analog"
  variation 10: /note="A in position 10 is a 2'-fluoro-adenosine (fA)"
  variation 11: /note="A in position 11 is a 2'-O-Methyladenosine (mA)"
  variation 12: /note="G in position 12 is a 2'-O-Methylguanosine (mG)"
  variation 13: /note="A in position 13 is a 2'-O-Methyladenosine (mA)"
  variation 14: /note="A in position 14 is a 2'-fluoro-adenosine (fA)"
  variation 15: /note="C in position 15 is a 2'-O-Methylcytidine (mC)"
  variation 16: /note="A in position 16 is a 2'-fluoro-adenosine (fA)"
  variation 17: /note="C in position 17 is a 2'-O-Methylcytidine (mC)"
  variation 18: /note="U in position 18 is a 2'- fluoro-uridine (fU)"
  variation 19: /note="G in position 19 is a 2'-O-Methylguanosine (mG)"
  variation 20: /note="U in position 20 is a 2'- fluoro-uridine (fU)"
  variation 21: /note="U in position 21 is a 2'-O-Methyluridine (mU)"
  variation 21: /note="the nucleotide in position 21 and the nucleotide in position 22 are linked through a phosphorothiate linkage "
  variation 22: /note="U in position 22 is a 2'-O-Methyluridine (mU)"
  variation 22: /note="the nucleotide in position 22 and the nucleotide in position 21 are linked through a phosphorothiate linkage "
  variation 22: /note="the nucleotide in position 22 and the nucleotide in position 23 are linked through a phosphorothiate linkage "
  variation 23: /note="U in position 23 is a 2'-O-Methyluridine (mU)"
  variation 23: /note="the nucleotide in position 23 and the nucleotide in position 22 are linked through a phosphorothiate linkage "
uuauagagcaagaacacuguuuu

SEQ ID NO: 139 - RNA, 23 nt, Artificial Sequence
  as3-71
  variation 1: /note="U in position 1 is a 2'-O-Methyluridine (mU)"
  variation 1: /note="the nucleotide in position 1 and the nucleotide in position 2 are linked through a phosphorothiate linkage "
  variation 2: /note="U in position 2 is a 2'- fluoro-uridine (fU)"
  variation 2: /note="the nucleotide in position 2 and the nucleotide in position 1 are linked through a phosphorothiate "
  variation 2: /note="the nucleotide in position 2 and the nucleotide in position 3 are linked through a phosphorothiate "
  variation 3: /note="A in position 3 is a 2'-O-Methyladenosine (mA)"
  variation 3: /note="the nucleotide in position 3 and the nucleotide in position 2 are linked through a phosphorothiate linkage "
  variation 4: /note="U in position 4 is a 2'- fluoro-uridine (fU)"
  variation 5: /note="A in position 5 is a 2'-O-Methyladenosine (mA)"
  variation 6: /note="G in position 6 is a 2'-fluoro-guanosine (fG)"
  variation 7: /note="A in position 7 is a lA1b analog"
  variation 8: /note="G in position 8 is a 2'-fluoro-guanosine (fG)"
  variation 9: /note="C in position 9 is a 2'-O-Methylcytidine (mC)"
  variation 10: /note="A in position 10 is a lA1b analolg"
  variation 11: /note="A in position 11 is a 2'-O-Methyladenosine (mA)"
  variation 12: /note="G in position 12 is a 2'-O-Methylguanosine (mG)"
  variation 13: /note="A in position 13 is a 2'-O-Methyladenosine (mA)"
  variation 14: /note="A in position 14 is a 2'-fluoro-adenosine (fA)"
  variation 15: /note="C in position 15 is a 2'-O-Methylcytidine (mC)"
  variation 16: /note="A in position 16 is a 2'-fluoro-adenosine (fA)"
  variation 17: /note="C in position 17 is a 2'-O-Methylcytidine (mC)"
  variation 18: /note="U in position 18 is a 2'- fluoro-uridine (fU)"
  variation 19: /note="G in position 19 is a 2'-O-Methylguanosine (mG)"
  variation 20: /note="U in position 20 is a 2'- fluoro-uridine (fU)"
  variation 21: /note="U in position 21 is a 2'-O-Methyluridine (mU)"
  variation 21: /note="the nucleotide in position 21 and the nucleotide in position 22 are linked through a phosphorothiate linkage "
  variation 22: /note="U in position 22 is a 2'-O-Methyluridine (mU)"
  variation 22: /note="the nucleotide in position 22 and the nucleotide in position 21 are linked through a phosphorothiate linkage "
  variation 22: /note="the nucleotide in position 22 and the nucleotide in position 23 are linked through a phosphorothiate linkage "
  variation 23: /note="U in position 23 is a 2'-O-Methyluridine (mU)"
  variation 23: /note="the nucleotide in position 23 and the nucleotide in position 22 are linked through a phosphorothiate linkage "
uuauagagcaagaacacuguuuu

SEQ ID NO: 140 - RNA, 23 nt, Artificial Sequence
  as3-72
  variation 1: /note="U in position 1 is a 2'-O-Methyluridine (mU)"
  variation 1: /note="the nucleotide in position 1 and the nucleotide in position 2 are linked through a phosphorothiate linkage "
  variation 2: /note="U in position 2 is a 2'- fluoro-uridine (fU)"
  variation 2: /note="the nucleotide in position 2 and the nucleotide in position 1 are linked through a phosphorothiate "
  variation 2: /note="the nucleotide in position 2 and the nucleotide in position 3 are linked through a phosphorothiate "
  variation 3: /note="A in position 3 is a 2'-O-Methyladenosine (mA)"
  variation 3: /note="the nucleotide in position 3 and the nucleotide in position 2 are linked through a phosphorothiate linkage "
  variation 4: /note="U in position 4 is a 2'- fluoro-uridine (fU)"
  variation 5: /note="A in position 5 is a 2'-O-Methyladenosine (mA)"
  variation 6: /note="G in position 6 is a 2'-fluoro-guanosine (fG)"
  variation 7: /note="A in position 7 is a lA1b analog"
  variation 8: /note="G in position 8 is a 2'-fluoro-guanosine (fG)"
  variation 9: /note="C in position 9 is a 2'-O-Methylcytidine (mC)"
  variation 10: /note="A in position 10 is a 2'-fluoro-adenosine (fA)"
  variation 11: /note="A in position 11 is a lA1b analog"
  variation 12: /note="G in position 12 is a 2'-O-Methylguanosine (mG)"
  variation 13: /note="A in position 13 is a 2'-O-Methyladenosine (mA)"
  variation 14: /note="A in position 14 is a 2'-fluoro-adenosine (fA)"
  variation 15: /note="C in position 15 is a 2'-O-Methylcytidine (mC)"
  variation 16: /note="A in position 16 is a 2'-fluoro-adenosine (fA)"
  variation 17: /note="C in position 17 is a 2'-O-Methylcytidine (mC)"
  variation 18: /note="U in position 18 is a 2'- fluoro-uridine (fU)"
  variation 19: /note="G in position 19 is a 2'-O-Methylguanosine (mG)"
  variation 20: /note="U in position 20 is a 2'- fluoro-uridine (fU)"
  variation 21: /note="U in position 21 is a 2'-O-Methyluridine (mU)"
  variation 21: /note="the nucleotide in position 21 and the nucleotide in position 22 are linked through a phosphorothiate linkage "
  variation 22: /note="U in position 22 is a 2'-O-Methyluridine (mU)"
  variation 22: /note="the nucleotide in position 22 and the nucleotide in position 21 are linked through a phosphorothiate linkage "
  variation 22: /note="the nucleotide in position 22 and the nucleotide in position 23 are linked through a phosphorothiate linkage "
  variation 23: /note="U in position 23 is a 2'-O-Methyluridine (mU)"
  variation 23: /note="the nucleotide in position 23 and the nucleotide in position 22 are linked through a phosphorothiate linkage "
uuauagagcaagaacacuguuuu

SEQ ID NO: 141 - RNA, 23 nt, Artificial Sequence
  as3-73
  variation 1: /note="U in position 1 is a 2'-O-Methyluridine (mU)"
  variation 1: /note="the nucleotide in position 1 and the nucleotide in position 2 are linked through a phosphorothiate linkage "
  variation 2: /note="U in position 2 is a 2'- fluoro-uridine (fU)"
  variation 2: /note="the nucleotide in position 2 and the nucleotide in position 1 are linked through a phosphorothiate "
  variation 2: /note="the nucleotide in position 2 and the nucleotide in position 3 are linked through a phosphorothiate "
  variation 3: /note="A in position 3 is a 2'-O-Methyladenosine (mA)"
  variation 3: /note="the nucleotide in position 3 and the nucleotide in position 2 are linked through a phosphorothiate linkage "
  variation 4: /note="U in position 4 is a 2'- fluoro-uridine (fU)"
  variation 5: /note="A in position 5 is a 2'-O-Methyladenosine (mA)"
  variation 6: /note="G in position 6 is a 2'-fluoro-guanosine (fG)"
  variation 7: /note="A in position 7 is a lA1b analog"
  variation 8: /note="G in position 8 is a 2'-fluoro-guanosine (fG)"
  variation 9: /note="C in position 9 is a 2'-O-Methylcytidine (mC)"
  variation 10: /note="A in position 10 is a 2'-fluoro-adenosine (fA)"
  variation 11: /note="A in position 11 is a 2'-O-Methyladenosine (mA)"
  variation 12: /note="G in position 12 is a lG1b analog"
  variation 13: /note="A in position 13 is a 2'-O-Methyladenosine (mA)"
  variation 14: /note="A in position 14 is a 2'-fluoro-adenosine (fA)"
  variation 15: /note="C in position 15 is a 2'-O-Methylcytidine (mC)"
  variation 16: /note="A in position 16 is a 2'-fluoro-adenosine (fA)"
  variation 17: /note="C in position 17 is a 2'-O-Methylcytidine (mC)"
  variation 18: /note="U in position 18 is a 2'- fluoro-uridine (fU)"
  variation 19: /note="G in position 19 is a 2'-O-Methylguanosine (mG)"
  variation 20: /note="U in position 20 is a 2'- fluoro-uridine (fU)"
  variation 21: /note="U in position 21 is a 2'-O-Methyluridine (mU)"
  variation 21: /note="the nucleotide in position 21 and the nucleotide in position 22 are linked through a phosphorothiate linkage "
  variation 22: /note="U in position 22 is a 2'-O-Methyluridine (mU)"
  variation 22: /note="the nucleotide in position 22 and the nucleotide in position 21 are linked through a phosphorothiate linkage "
  variation 22: /note="the nucleotide in position 22 and the nucleotide in position 23 are linked through a phosphorothiate linkage "
  variation 23: /note="U in position 23 is a 2'-O-Methyluridine (mU)"
  variation 23: /note="the nucleotide in position 23 and the nucleotide in position 22 are linked through a phosphorothiate linkage "
uuauagagcaagaacacuguuuu

SEQ ID NO: 142 - RNA, 23 nt, Artificial Sequence
  as3-74
  variation 1: /note="U in position 1 is a 2'-O-Methyluridine (mU)"
  variation 1: /note="the nucleotide in position 1 and the nucleotide in position 2 are linked through a phosphorothiate linkage "
  variation 2: /note="U in position 2 is a 2'- fluoro-uridine (fU)"
  variation 2: /note="the nucleotide in position 2 and the nucleotide in position 1 are linked through a phosphorothiate "
  variation 2: /note="the nucleotide in position 2 and the nucleotide in position 3 are linked through a phosphorothiate "
  variation 3: /note="A in position 3 is a 2'-O-Methyladenosine (mA)"
  variation 3: /note="the nucleotide in position 3 and the nucleotide in position 2 are linked through a phosphorothiate linkage "
  variation 4: /note="U in position 4 is a 2'- fluoro-uridine (fU)"
  variation 5: /note="A in position 5 is a 2'-O-Methyladenosine (mA)"
  variation 6: /note="G in position 6 is a 2'-fluoro-guanosine (fG)"
  variation 7: /note="A in position 7 is a lA1b analog"
  variation 8: /note="G in position 8 is a 2'-fluoro-guanosine (fG)"
  variation 9: /note="C in position 9 is a 2'-O-Methylcytidine (mC)"
  variation 10: /note="A in position 10 is a 2'-fluoro-adenosine (fA)"
  variation 11: /note="A in position 11 is a 2'-O-Methyladenosine (mA)"
  variation 12: /note="G in position 12 is a 2'-O-Methylguanosine (mG)"
  variation 13: /note="A in position 13 is a lA1b analog"
  variation 14: /note="A in position 14 is a 2'-fluoro-adenosine (fA)"
  variation 15: /note="C in position 15 is a 2'-O-Methylcytidine (mC)"
  variation 16: /note="A in position 16 is a 2'-fluoro-adenosine (fA)"
  variation 17: /note="C in position 17 is a 2'-O-Methylcytidine (mC)"
  variation 18: /note="U in position 18 is a 2'- fluoro-uridine (fU)"
  variation 19: /note="G in position 19 is a 2'-O-Methylguanosine (mG)"
  variation 20: /note="U in position 20 is a 2'- fluoro-uridine (fU)"
  variation 21: /note="U in position 21 is a 2'-O-Methyluridine (mU)"
  variation 21: /note="the nucleotide in position 21 and the nucleotide in position 22 are linked through a phosphorothiate linkage "
  variation 22: /note="U in position 22 is a 2'-O-Methyluridine (mU)"
  variation 22: /note="the nucleotide in position 22 and the nucleotide in position 21 are linked through a phosphorothiate linkage "
  variation 22: /note="the nucleotide in position 22 and the nucleotide in position 23 are linked through a phosphorothiate linkage "
  variation 23: /note="U in position 23 is a 2'-O-Methyluridine (mU)"
  variation 23: /note="the nucleotide in position 23 and the nucleotide in position 22 are linked through a phosphorothiate linkage "
uuauagagcaagaacacuguuuu

SEQ ID NO: 143 - RNA, 23 nt, Artificial Sequence
  as3-75
  variation 1: /note="U in position 1 is a 2'-O-Methyluridine (mU)"
  variation 1: /note="the nucleotide in position 1 and the nucleotide in position 2 are linked through a phosphorothiate linkage "
  variation 2: /note="U in position 2 is a 2'- fluoro-uridine (fU)"
  variation 2: /note="the nucleotide in position 2 and the nucleotide in position 1 are linked through a phosphorothiate "
  variation 2: /note="the nucleotide in position 2 and the nucleotide in position 3 are linked through a phosphorothiate "
  variation 3: /note="A in position 3 is a 2'-O-Methyladenosine (mA)"
  variation 3: /note="the nucleotide in position 3 and the nucleotide in position 2 are linked through a phosphorothiate linkage "
  variation 4: /note="U in position 4 is a 2'- fluoro-uridine (fU)"
  variation 5: /note="A in position 5 is a 2'-O-Methyladenosine (mA)"
  variation 6: /note="G in position 6 is a 2'-fluoro-guanosine (fG)"
  variation 7: /note="A in position 7 is a lA1b analog"
  variation 8: /note="G in position 8 is a 2'-fluoro-guanosine (fG)"
  variation 9: /note="C in position 9 is a 2'-O-Methylcytidine (mC)"
  variation 10: /note="A in position 10 is a 2'-fluoro-adenosine (fA)"
  variation 11: /note="A in position 11 is a 2'-O-Methyladenosine (mA)"
  variation 12: /note="G in position 12 is a 2'-O-Methylguanosine (mG)"
  variation 13: /note="A in position 13 is a 2'-O-Methyladenosine (mA)"
  variation 14: /note="A in position 14 is a lA1b analog"
  variation 15: /note="C in position 15 is a 2'-O-Methylcytidine (mC)"
  variation 16: /note="A in position 16 is a 2'-fluoro-adenosine (fA)"
  variation 17: /note="C in position 17 is a 2'-O-Methylcytidine (mC)"
  variation 18: /note="U in position 18 is a 2'- fluoro-uridine (fU)"
  variation 19: /note="G in position 19 is a 2'-O-Methylguanosine (mG)"
  variation 20: /note="U in position 20 is a 2'- fluoro-uridine (fU)"
  variation 21: /note="U in position 21 is a 2'-O-Methyluridine (mU)"
  variation 21: /note="the nucleotide in position 21 and the nucleotide in position 22 are linked through a phosphorothiate linkage "
  variation 22: /note="U in position 22 is a 2'-O-Methyluridine (mU)"
  variation 22: /note="the nucleotide in position 22 and the nucleotide in position 21 are linked through a phosphorothiate linkage "
  variation 22: /note="the nucleotide in position 22 and the nucleotide in position 23 are linked through a phosphorothiate linkage "
  variation 23: /note="U in position 23 is a 2'-O-Methyluridine (mU)"
  variation 23: /note="the nucleotide in position 23 and the nucleotide in position 22 are linked through a phosphorothiate linkage "
uuauagagcaagaacacuguuuu

SEQ ID NO: 144 - RNA, 23 nt, Artificial Sequence
  3-76
  variation 1: /note="U in position 1 is a 2'-O-Methyluridine (mU)"
  variation 1: /note="the nucleotide in position 1 and the nucleotide in position 2 are linked through a phosphorothiate linkage "
  variation 2: /note="U in position 2 is a 2'- fluoro-uridine (fU)"
  variation 2: /note="the nucleotide in position 2 and the nucleotide in position 1 are linked through a phosphorothiate "
  variation 2: /note="the nucleotide in position 2 and the nucleotide in position 3 are linked through a phosphorothiate "
  variation 3: /note="A in position 3 is a 2'-O-Methyladenosine (mA)"
  variation 3: /note="the nucleotide in position 3 and the nucleotide in position 2 are linked through a phosphorothiate linkage "
  variation 4: /note="U in position 4 is a 2'- fluoro-uridine (fU)"
  variation 5: /note="A in position 5 is a 2'-O-Methyladenosine (mA)"
  variation 6: /note="G in position 6 is a 2'-fluoro-guanosine (fG)"
  variation 7: /note="A in position 7 is a lA1b analog"
  variation 8: /note="G in position 8 is a 2'-fluoro-guanosine (fG)"
  variation 9: /note="C in position 9 is a 2'-O-Methylcytidine (mC)"
  variation 10: /note="A in position 10 is a 2'-fluoro-adenosine (fA)"
  variation 11: /note="A in position 11 is a 2'-O-Methyladenosine (mA)"
  variation 12: /note="G in position 12 is a 2'-O-Methylguanosine (mG)"
  variation 13: /note="A in position 13 is a 2'-O-Methyladenosine (mA)"
  variation 14: /note="A in position 14 is a 2'-fluoro-adenosine (fA)"
  variation 15: /note="C in position 15 is a lC1b analog"
  variation 16: /note="A in position 16 is a 2'-fluoro-adenosine (fA)"
  variation 17: /note="C in position 17 is a 2'-O-Methylcytidine (mC)"
  variation 18: /note="U in position 18 is a 2'- fluoro-uridine (fU)"
  variation 19: /note="G in position 19 is a 2'-O-Methylguanosine (mG)"
  variation 20: /note="U in position 20 is a 2'- fluoro-uridine (fU)"
  variation 21: /note="U in position 21 is a 2'-O-Methyluridine (mU)"
  variation 21: /note="the nucleotide in position 21 and the nucleotide in position 22 are linked through a phosphorothiate linkage "
  variation 22: /note="U in position 22 is a 2'-O-Methyluridine (mU)"
  variation 22: /note="the nucleotide in position 22 and the nucleotide in position 21 are linked through a phosphorothiate linkage "
  variation 22: /note="the nucleotide in position 22 and the nucleotide in position 23 are linked through a phosphorothiate linkage "
  variation 23: /note="U in position 23 is a 2'-O-Methyluridine (mU)"
  variation 23: /note="the nucleotide in position 23 and the nucleotide in position 22 are linked through a phosphorothiate linkage "
uuauagagcaagaacacuguuuu

SEQ ID NO: 145 - RNA, 23 nt, Artificial Sequence
  as3-77
  variation 1: /note="U in position 1 is a 2'-O-Methyluridine (mU)"
  variation 1: /note="the nucleotide in position 1 and the nucleotide in position 2 are linked through a phosphorothiate linkage "
  variation 2: /note="U in position 2 is a 2'- fluoro-uridine (fU)"
  variation 2: /note="the nucleotide in position 2 and the nucleotide in position 1 are linked through a phosphorothiate "
  variation 2: /note="the nucleotide in position 2 and the nucleotide in position 3 are linked through a phosphorothiate "
  variation 3: /note="A in position 3 is a 2'-O-Methyladenosine (mA)"
  variation 3: /note="the nucleotide in position 3 and the nucleotide in position 2 are linked through a phosphorothiate linkage "
  variation 4: /note="U in position 4 is a 2'- fluoro-uridine (fU)"
  variation 5: /note="A in position 5 is a 2'-O-Methyladenosine (mA)"
  variation 6: /note="G in position 6 is a 2'-fluoro-guanosine (fG)"
  variation 7: /note="A in position 7 is a lA1b analog"
  variation 8: /note="G in position 8 is a 2'-fluoro-guanosine (fG)"
  variation 9: /note="C in position 9 is a 2'-O-Methylcytidine (mC)"
  variation 10: /note="A in position 10 is a 2'-fluoro-adenosine (fA)"
  variation 11: /note="A in position 11 is a 2'-O-Methyladenosine (mA)"
  variation 12: /note="G in position 12 is a 2'-O-Methylguanosine (mG)"
  variation 13: /note="A in position 13 is a 2'-O-Methyladenosine (mA)"
  variation 14: /note="A in position 14 is a 2'-fluoro-adenosine (fA)"
  variation 15: /note="C in position 15 is a 2'-O-Methylcytidine (mC)"
  variation 16: /note="A in position 16 is a lA1b analog"
  variation 17: /note="C in position 17 is a 2'-O-Methylcytidine (mC)"
  variation 18: /note="U in position 18 is a 2'- fluoro-uridine (fU)"
  variation 19: /note="G in position 19 is a 2'-O-Methylguanosine (mG)"
  variation 20: /note="U in position 20 is a 2'- fluoro-uridine (fU)"
  variation 21: /note="U in position 21 is a 2'-O-Methyluridine (mU)"
  variation 21: /note="the nucleotide in position 21 and the nucleotide in position 22 are linked through a phosphorothiate linkage "
  variation 22: /note="U in position 22 is a 2'-O-Methyluridine (mU)"
  variation 22: /note="the nucleotide in position 22 and the nucleotide in position 21 are linked through a phosphorothiate linkage "
  variation 22: /note="the nucleotide in position 22 and the nucleotide in position 23 are linked through a phosphorothiate linkage "
  variation 23: /note="U in position 23 is a 2'-O-Methyluridine (mU)"
  variation 23: /note="the nucleotide in position 23 and the nucleotide in position 22 are linked through a phosphorothiate linkage "
uuauagagcaagaacacuguuuu

SEQ ID NO: 146 - RNA, 23 nt, Artificial Sequence
  as3-78
  variation 1: /note="U in position 1 is a 2'-O-Methyluridine (mU)"
  variation 1: /note="the nucleotide in position 1 and the nucleotide in position 2 are linked through a phosphorothiate linkage "
  variation 2: /note="U in position 2 is a 2'- fluoro-uridine (fU)"
  variation 2: /note="the nucleotide in position 2 and the nucleotide in position 1 are linked through a phosphorothiate "
  variation 2: /note="the nucleotide in position 2 and the nucleotide in position 3 are linked through a phosphorothiate "
  variation 3: /note="A in position 3 is a 2'-O-Methyladenosine (mA)"
  variation 3: /note="the nucleotide in position 3 and the nucleotide in position 2 are linked through a phosphorothiate linkage "
  variation 4: /note="U in position 4 is a 2'- fluoro-uridine (fU)"
  variation 5: /note="A in position 5 is a 2'-O-Methyladenosine (mA)"
  variation 6: /note="G in position 6 is a 2'-fluoro-guanosine (fG)"
  variation 7: /note="A in position 7 is a lA1b analog"
  variation 8: /note="G in position 8 is a 2'-fluoro-guanosine (fG)"
  variation 9: /note="C in position 9 is a 2'-O-Methylcytidine (mC)"
  variation 10: /note="A in position 10 is a 2'-fluoro-adenosine (fA)"
  variation 11: /note="A in position 11 is a 2'-O-Methyladenosine (mA)"
  variation 12: /note="G in position 12 is a 2'-O-Methylguanosine (mG)"
  variation 13: /note="A in position 13 is a 2'-O-Methyladenosine (mA)"
  variation 14: /note="A in position 14 is a 2'-fluoro-adenosine (fA)"
  variation 15: /note="C in position 15 is a 2'-O-Methylcytidine (mC)"
  variation 16: /note="A in position 16 is a 2'-fluoro-adenosine (fA)"
  variation 17: /note="C in position 17 is a lC1b analog"
  variation 18: /note="U in position 18 is a 2'- fluoro-uridine (fU)"
  variation 19: /note="G in position 19 is a 2'-O-Methylguanosine (mG)"
  variation 20: /note="U in position 20 is a 2'- fluoro-uridine (fU)"
  variation 21: /note="U in position 21 is a 2'-O-Methyluridine (mU)"
  variation 21: /note="the nucleotide in position 21 and the nucleotide in position 22 are linked through a phosphorothiate linkage "
  variation 22: /note="U in position 22 is a 2'-O-Methyluridine (mU)"
  variation 22: /note="the nucleotide in position 22 and the nucleotide in position 21 are linked through a phosphorothiate linkage "
  variation 22: /note="the nucleotide in position 22 and the nucleotide in position 23 are linked through a phosphorothiate linkage "
  variation 23: /note="U in position 23 is a 2'-O-Methyluridine (mU)"
  variation 23: /note="the nucleotide in position 23 and the nucleotide in position 22 are linked through a phosphorothiate linkage "
uuauagagcaagaacacuguuuu

SEQ ID NO: 147 - RNA, 23 nt, Artificial Sequence
  as3-79
  variation 1: /note="U in position 1 is a 2'-O-Methyluridine (mU)"
  variation 1: /note="the nucleotide in position 1 and the nucleotide in position 2 are linked through a phosphorothiate linkage "
  variation 2: /note="U in position 2 is a 2'- fluoro-uridine (fU)"
  variation 2: /note="the nucleotide in position 2 and the nucleotide in position 1 are linked through a phosphorothiate "
  variation 2: /note="the nucleotide in position 2 and the nucleotide in position 3 are linked through a phosphorothiate "
  variation 3: /note="A in position 3 is a 2'-O-Methyladenosine (mA)"
  variation 3: /note="the nucleotide in position 3 and the nucleotide in position 2 are linked through a phosphorothiate linkage "
  variation 4: /note="U in position 4 is a 2'- fluoro-uridine (fU)"
  variation 5: /note="A in position 5 is a 2'-O-Methyladenosine (mA)"
  variation 6: /note="G in position 6 is a 2'-fluoro-guanosine (fG)"
  variation 7: /note="A in position 7 is a lA1b analog"
  variation 8: /note="G in position 8 is a 2'-fluoro-guanosine (fG)"
  variation 9: /note="C in position 9 is a 2'-O-Methylcytidine (mC)"
  variation 10: /note="A in position 10 is a 2'-fluoro-adenosine (fA)"
  variation 11: /note="A in position 11 is a 2'-O-Methyladenosine (mA)"
  variation 12: /note="G in position 12 is a 2'-O-Methylguanosine (mG)"
  variation 13: /note="A in position 13 is a 2'-O-Methyladenosine (mA)"
  variation 14: /note="A in position 14 is a 2'-fluoro-adenosine (fA)"
  variation 15: /note="C in position 15 is a 2'-O-Methylcytidine (mC)"
  variation 16: /note="A in position 16 is a 2'-fluoro-adenosine (fA)"
  variation 17: /note="C in position 17 is a 2'-O-Methylcytidine (mC)"
  variation 18: /note="U in position 18 is a lU1b analog"
  variation 19: /note="G in position 19 is a 2'-O-Methylguanosine (mG)"
  variation 20: /note="U in position 20 is a 2'- fluoro-uridine (fU)"
  variation 21: /note="U in position 21 is a 2'-O-Methyluridine (mU)"
  variation 21: /note="the nucleotide in position 21 and the nucleotide in position 22 are linked through a phosphorothiate linkage "
  variation 22: /note="U in position 22 is a 2'-O-Methyluridine (mU)"
  variation 22: /note="the nucleotide in position 22 and the nucleotide in position 21 are linked through a phosphorothiate linkage "
  variation 22: /note="the nucleotide in position 22 and the nucleotide in position 23 are linked through a phosphorothiate linkage "
  variation 23: /note="U in position 23 is a 2'-O-Methyluridine (mU)"
  variation 23: /note="the nucleotide in position 23 and the nucleotide in position 22 are linked through a phosphorothiate linkage "
uuauagagcaagaacacuguuuu

SEQ ID NO: 148 - RNA, 23 nt, Artificial Sequence
  as3-80
  variation 1: /note="U in position 1 is a 2'-O-Methyluridine (mU)"
  variation 1: /note="the nucleotide in position 1 and the nucleotide in position 2 are linked through a phosphorothiate linkage "
  variation 2: /note="U in position 2 is a 2'- fluoro-uridine (fU)"
  variation 2: /note="the nucleotide in position 2 and the nucleotide in position 1 are linked through a phosphorothiate "
  variation 2: /note="the nucleotide in position 2 and the nucleotide in position 3 are linked through a phosphorothiate "
  variation 3: /note="A in position 3 is a 2'-O-Methyladenosine (mA)"
  variation 3: /note="the nucleotide in position 3 and the nucleotide in position 2 are linked through a phosphorothiate linkage "
  variation 4: /note="U in position 4 is a 2'- fluoro-uridine (fU)"
  variation 5: /note="A in position 5 is a 2'-O-Methyladenosine (mA)"
  variation 6: /note="G in position 6 is a 2'-fluoro-guanosine (fG)"
  variation 7: /note="A in position 7 is a lA1b analog"
  variation 8: /note="G in position 8 is a 2'-fluoro-guanosine (fG)"
  variation 9: /note="C in position 9 is a 2'-O-Methylcytidine (mC)"
  variation 10: /note="A in position 10 is a 2'-fluoro-adenosine (fA)"
  variation 11: /note="A in position 11 is a 2'-O-Methyladenosine (mA)"
  variation 12: /note="G in position 12 is a 2'-O-Methylguanosine (mG)"
  variation 13: /note="A in position 13 is a 2'-O-Methyladenosine (mA)"
  variation 14: /note="A in position 14 is a 2'-fluoro-adenosine (fA)"
  variation 15: /note="C in position 15 is a 2'-O-Methylcytidine (mC)"
  variation 16: /note="A in position 16 is a 2'-fluoro-adenosine (fA)"
  variation 17: /note="C in position 17 is a 2'-O-Methylcytidine (mC)"
  variation 18: /note="U in position 18 is a 2'- fluoro-uridine (fU)"
  variation 19: /note="G in position 19 is a lG1b analog"
  variation 20: /note="U in position 20 is a 2'- fluoro-uridine (fU)"
  variation 21: /note="U in position 21 is a 2'-O-Methyluridine (mU)"
  variation 21: /note="the nucleotide in position 21 and the nucleotide in position 22 are linked through a phosphorothiate linkage "
  variation 22: /note="U in position 22 is a 2'-O-Methyluridine (mU)"
  variation 22: /note="the nucleotide in position 22 and the nucleotide in position 21 are linked through a phosphorothiate linkage "
  variation 22: /note="the nucleotide in position 22 and the nucleotide in position 23 are linked through a phosphorothiate linkage "
  variation 23: /note="U in position 23 is a 2'-O-Methyluridine (mU)"
  variation 23: /note="the nucleotide in position 23 and the nucleotide in position 22 are linked through a phosphorothiate linkage "
uuauagagcaagaacacuguuuu

SEQ ID NO: 149 - RNA, 23 nt, Artificial Sequence
  as3-81
  variation 1: /note="U in position 1 is a 2'-O-Methyluridine (mU)"
  variation 1: /note="the nucleotide in position 1 and the nucleotide in position 2 are linked through a phosphorothiate linkage "
  variation 2: /note="U in position 2 is a 2'- fluoro-uridine (fU)"
  variation 2: /note="the nucleotide in position 2 and the nucleotide in position 1 are linked through a phosphorothiate "
  variation 2: /note="the nucleotide in position 2 and the nucleotide in position 3 are linked through a phosphorothiate "
  variation 3: /note="A in position 3 is a 2'-O-Methyladenosine (mA)"
  variation 3: /note="the nucleotide in position 3 and the nucleotide in position 2 are linked through a phosphorothiate linkage "
  variation 4: /note="U in position 4 is a 2'- fluoro-uridine (fU)"
  variation 5: /note="A in position 5 is a 2'-O-Methyladenosine (mA)"
  variation 6: /note="G in position 6 is a 2'-fluoro-guanosine (fG)"
  variation 7: /note="A in position 7 is a lA1b analog"
  variation 8: /note="G in position 8 is a 2'-fluoro-guanosine (fG)"
  variation 9: /note="C in position 9 is a 2'-O-Methylcytidine (mC)"
  variation 10: /note="A in position 10 is a 2'-fluoro-adenosine (fA)"
  variation 11: /note="A in position 11 is a 2'-O-Methyladenosine (mA)"
  variation 12: /note="G in position 12 is a 2'-O-Methylguanosine (mG)"
  variation 13: /note="A in position 13 is a 2'-O-Methyladenosine (mA)"
  variation 14: /note="A in position 14 is a 2'-fluoro-adenosine (fA)"
  variation 15: /note="C in position 15 is a 2'-O-Methylcytidine (mC)"
  variation 16: /note="A in position 16 is a 2'-fluoro-adenosine (fA)"
  variation 17: /note="C in position 17 is a 2'-O-Methylcytidine (mC)"
  variation 18: /note="U in position 18 is a 2'- fluoro-uridine (fU)"
  variation 19: /note="G in position 19 is a 2'-O-Methylguanosine (mG)"
  variation 20: /note="U in position 20 is a lU1b analog"
  variation 21: /note="U in position 21 is a 2'-O-Methyluridine (mU)"
  variation 21: /note="the nucleotide in position 21 and the nucleotide in position 22 are linked through a phosphorothiate linkage "
  variation 22: /note="U in position 22 is a 2'-O-Methyluridine (mU)"
  variation 22: /note="the nucleotide in position 22 and the nucleotide in position 21 are linked through a phosphorothiate linkage "
  variation 22: /note="the nucleotide in position 22 and the nucleotide in position 23 are linked through a phosphorothiate linkage "
  variation 23: /note="U in position 23 is a 2'-O-Methyluridine (mU)"
  variation 23: /note="the nucleotide in position 23 and the nucleotide in position 22 are linked through a phosphorothiate linkage "
uuauagagcaagaacacuguuuu

SEQ ID NO: 150 - RNA, 23 nt, Artificial Sequence
  as3-82
  variation 1: /note="U in position 1 is a 2'-O-Methyluridine (mU)"
  variation 1: /note="the nucleotide in position 1 and the nucleotide in position 2 are linked through a phosphorothiate linkage "
  variation 2: /note="U in position 2 is a 2'- fluoro-uridine (fU)"
  variation 2: /note="the nucleotide in position 2 and the nucleotide in position 1 are linked through a phosphorothiate "
  variation 2: /note="the nucleotide in position 2 and the nucleotide in position 3 are linked through a phosphorothiate "
  variation 3: /note="A in position 3 is a 2'-O-Methyladenosine (mA)"
  variation 3: /note="the nucleotide in position 3 and the nucleotide in position 2 are linked through a phosphorothiate linkage "
  variation 4: /note="U in position 4 is a 2'- fluoro-uridine (fU)"
  variation 5: /note="A in position 5 is a 2'-O-Methyladenosine (mA)"
  variation 6: /note="G in position 6 is a 2'-fluoro-guanosine (fG)"
  variation 7: /note="A in position 7 is a lA1b analog"
  variation 8: /note="G in position 8 is a 2'-fluoro-guanosine (fG)"
  variation 9: /note="C in position 9 is a 2'-O-Methylcytidine (mC)"
  variation 10: /note="A in position 10 is a 2'-fluoro-adenosine (fA)"
  variation 11: /note="A in position 11 is a 2'-O-Methyladenosine (mA)"
  variation 12: /note="G in position 12 is a 2'-O-Methylguanosine (mG)"
  variation 13: /note="A in position 13 is a 2'-O-Methyladenosine (mA)"
  variation 14: /note="A in position 14 is a 2'-fluoro-adenosine (fA)"
  variation 15: /note="C in position 15 is a 2'-O-Methylcytidine (mC)"
  variation 16: /note="A in position 16 is a 2'-fluoro-adenosine (fA)"
  variation 17: /note="C in position 17 is a 2'-O-Methylcytidine (mC)"
  variation 18: /note="U in position 18 is a 2'- fluoro-uridine (fU)"
  variation 19: /note="G in position 19 is a 2'-O-Methylguanosine (mG)"
  variation 20: /note="U in position 20 is a 2'- fluoro-uridine (fU)"
  variation 21: /note="U in position 21 is a lU1b analog"
  variation 21: /note="the nucleotide in position 21 and the nucleotide in position 22 are linked through a phosphorothiate linkage "
  variation 22: /note="U in position 22 is a 2'-O-Methyluridine (mU)"
  variation 22: /note="the nucleotide in position 22 and the nucleotide in position 21 are linked through a phosphorothiate linkage "
  variation 22: /note="the nucleotide in position 22 and the nucleotide in position 23 are linked through a phosphorothiate linkage "
  variation 23: /note="U in position 23 is a 2'-O-Methyluridine (mU)"
  variation 23: /note="the nucleotide in position 23 and the nucleotide in position 22 are linked through a phosphorothiate linkage "
uuauagagcaagaacacuguuuu
